(19) United States
(12) Patent Application Publication
(10) Pub. No.: US 2025/0277194 A1
(43) Pub. Date: Sep. 4, 2025

(54) METHODS AND COMPOSITIONS FOR SHORT STATURE PLANTS THROUGH MANIPULATION OF GIBBERELLIN METABOLISM

(71) Applicant: Monsanto Technology LLC, St. Louis, MO (US)

(72) Inventors: Edwards ALLEN, O'Fallon, MO (US); Jayanand BODDU, St. Louis, MO (US); Alexander GOLDSHMIDT, Rehovot (IL); Anil NEELAM, Wildwood, MO (US); Tomasz PACIOREK, Wildwood, MO (US); Thomas SLEWINSKI, Chesterfield, MO (US); Huai WANG, Chesterfield, MO (US)

(73) Assignee: Monsanto Technology LLC, St. Louis, MO (US)

(21) Appl. No.: 18/267,061

(22) PCT Filed: Dec. 15, 2021
(86) PCT No.: PCT/US2021/072940

§ 371 Date: Jun. 13, 2023

Related U.S. Application Data
(60) Provisional application No. 63/125,752, filed on Dec. 15, 2020.
(60) Provisional application No. 63/180,344, filed on Apr. 27, 2021.

(51) Int. Cl. C12N 9/02; C12N 15/82

(52) U.S. Cl. CPC C12N 9/0071; C12N 15/8225; C12N 15/8262; C12N 15/8297; C12Y 114/11013

(57) ABSTRACT

The present disclosure provides compositions and methods for altering gibberellin (GA) content in corn plants. Methods and compositions are provided for ectopically or transgenically expressing a GA2 oxidase in corn plants. Modified plants, plant parts and plant cells having a recombinant DNA construct for expression of a GA2 oxidase transgene are further provided that may comprise reduced gibberellin levels and improved characteristics, such as reduced plant height and increased lodging resistance, but without off-types.

### CROSS-REFERENCE TO RELATED APPLICATIONS

[0001] This application is a national stage application under 35 U.S.C. § 371 of International Application No. PCT/US2021/072940, filed internationally on Dec. 15, 2021, which claims priority to and the benefit of U.S. Provisional Application No. 63/125,752, filed on Dec. 15, 2020 and U.S. Provisional Application No. 63/180,344, filed on Apr. 27, 2021, the entire disclosures of each of which are incorporated herein by reference in their entirety.

### SUBMISSION OF SEQUENCE LISTING ON ASCII TEXT FILE

[0002] The content of the following submission on ASCII text file is incorporated herein by reference in its entirety: a computer readable form (CRF) of the Sequence Listing (file name: 777052061200SEQLIST.TXT, date recorded: Jun. 6, 2023, size: 732,209 bytes).

### BACKGROUND

### Field

[0003] The present disclosure relates to compositions and methods for improving traits, such as lodging resistance and increased yield in corn plants.

### Related Art

[0004] Gibberellins (gibberellic acids or GAs) are plant hormones that regulate a number of major plant growth and developmental processes. Manipulation of GA levels in semi-dwarf wheat, rice and Sorghum plant varieties led to increased yield and reduced lodging in these cereal crops during the 20^{th} century, which was largely responsible for the Green Revolution. However, successful yield gains in other cereal crops, such as corn, have not been realized through manipulation of the GA pathway. Indeed, some mutations in the GA pathway genes have been associated with various off-types in corn that are incompatible with yield, which has led researchers away from finding semi-dwarf, high-yielding corn varieties via manipulation of the GA pathway.

[0005] There continues to be a need in the art for the development of additional traits in corn plants, for increased yield and/or resistance to lodging.

### SUMMARY

[0006] In one aspect, provided herein is a recombinant DNA construct comprising a transcribable DNA sequence encoding a GA2 oxidase protein and a plant-expressible promoter, wherein the transcribable DNA sequence is operably linked to the plant-expressible promoter. In some embodiments of this aspect, the GA2 oxidase protein is, or comprises a sequence that is, at least 80%, at least 85%, at least 90%, at least 95%, at least 96%, at least 97%, at least 98%, at least 99%, at least 99.5%, or 100% identical to one or more of SEQ ID NOs: 2, 4, 6, 8, 10, 12, 14, 16, 18, 20, 22, 24 and/or 26. In some embodiments of this aspect, which may be combined with the preceding embodiment, the transcribable DNA sequence is, or comprises a sequence that is, at least 80%, at least 85%, at least 90%, at least 95%, at least 96%, at least 97%, at least 98%, at least 99%, at least 99.5%, or 100% identical to one or more of SEQ ID NOs: 1, 3, 5, 7, 9, 11, 13, 15, 17, 19, 21, 23 and/or 25. In some embodiments of this aspect, which may be combined with any of the preceding embodiments, the GA2 oxidase protein is, or comprises a sequence that is, at least 80%, at least 85%, at least 90%, at least 95%, at least 96%, at least 97%, at least 98%, at least 99%, at least 99.5%, or 100% identical to one or more of SEQ ID NOs: 28, 30, 32, 34, 36, 38, 40, 42, 44 and/or 46. In some embodiments of this aspect, which may be combined with any of the preceding embodiments, the transcribable DNA sequence is, or comprises a sequence that is, at least 80%, at least 85%, at least 90%, at least 95%, at least 96%, at least 97%, at least 98%, at least 99%, at least 99.5%, or 100% identical to one or more of SEQ ID NOs: 27, 29, 31, 33, 35, 37, 39, 41, 43 and/or 45. In some embodiments of this aspect, which may be combined with any of the preceding embodiments, the GA2 oxidase protein is, or comprises a sequence that is, at least 80%, at least 85%, at least 90%, at least 95%, at least 96%, at least 97%, at least 98%, at least 99%, at least 99.5%, or 100% identical to one or more of SEQ ID NOs: 48, 50, 52, 54, 56, 58, 60 and/or 62. In some embodiments of this aspect, which may be combined with any of the preceding embodiments, the transcribable DNA sequence is, or comprises a sequence that is, at least 80%, at least 85%, at least 90%, at least 95%, at least 96%, at least 97%, at least 98%, at least 99%, at least 99.5%, or 100% identical to one or more of SEQ ID NOs: 47, 49, 51, 53, 55, 57, 59 and/or 61. In some embodiments of this aspect, which may be combined with any of the preceding embodiments, the GA2 oxidase protein is, or comprises a sequence that is, at least 80%, at least 85%, at least 90%, at least 95%, at least 96%, at least 97%, at least 98%, at least 99%, at least 99.5%, or 100% identical to one or more of SEQ ID NOs: 64, 66, 68, 70, 72, 74, 76, 78, 80, 82, 84, 86, 88, 90, 92 and/or 94. In some embodiments of this aspect, which may be combined with any of the preceding embodiments, the transcribable DNA sequence is, or comprises a sequence that is, at least 80%, at least 85%, at least 90%, at least 95%, at least 96%, at least 97%, at least 98%, at least 99%, at least 99.5%, or 100% identical to one or more of SEQ ID NOs: 63, 65, 67, 69, 71, 73, 75, 77, 79, 81, 83, 85, 87, 89, 91 and/or 93. In some embodiments of this aspect, which may be combined with any of the preceding embodiments, the GA2 oxidase protein is, or comprises a sequence that is, at least 80%, at least 85%, at least 90%, at least 95%, at least 96%, at least 97%, at least 98%, at least 99%, at least 99.5%, or 100% identical to one or more of SEQ ID NOs: 96, 98, 100, 102, 104, 106, 108, 110, 112, 114, 116, 118, 120, 122 and/or 124. In some embodiments of this aspect, which may be combined with any of the preceding embodiments, the transcribable DNA sequence is, or comprises a sequence that is, at least 80%, at least 85%, at least 90%, at least 95%, at least 96%, at least 97%, at least 98%, at least 99%, at least 99.5%, or 100% identical to one or more of SEQ ID NOs: 95, 97, 99, 101, 103, 105, 107, 109, 111, 113, 115, 117, 119, 121 and/or 123. In some embodiments of this aspect, which may be combined with any of the preceding embodiments, the GA2 oxidase protein is, or comprises a sequence that is, at least 80%, at least 85%, at least 90%, at least 95%, at least 96%, at least 97%, at least 98%, at least 99%, at least 99.5%, or 100% identical to one or more of SEQ ID NOs: 126, 128, 130, 132, 134, 136, 138, 140, 142, 144 and/or 146. In some embodiments of this aspect, which may be combined with any of the preceding embodiments, the transcribable DNA sequence is, or comprises a sequence that is, at least 80%, at least 85%, at least 90%, at least 95%, at least 96%, at least 97%, at least 98%, at least 99%, at least 99.5%, or 100% identical to one or more of SEQ ID NOs: 125, 127, 129, 131, 133, 135, 137, 139, 141, 143 and/or 145. In some embodiments of this aspect, which may be combined with any of the preceding embodiments, the GA2 oxidase protein is, or comprises a sequence that is, at least 80%, at least 85%, at least 90%, at least 95%, at least 96%, at least 97%, at least 98%, at least 99%, at least 99.5%, or 100% identical to one or more of SEQ ID NOs: 148, 150, 152, 154, 156, 158, 160, 162, 164, 166, 168, 170, 172, 174, 176 and/or 178. In some embodiments of this aspect, which may be combined with any of the preceding embodiments, the transcribable DNA sequence is, or comprises a sequence that is, at least 80%, at least 85%, at least 90%, at least 95%, at least 96%, at least 97%, at least 98%, at least 99%, at least 99.5%, or 100% identical to one or more of SEQ ID NOs: 147, 149, 151, 153, 155, 157, 159, 161, 163, 165, 167, 169, 171, 173, 175 and/or 177. In some embodiments of this aspect, which may be combined with any of the preceding embodiments, the GA2 oxidase protein is, or comprises a sequence that is, at least 80%, at least 85%, at least 90%, at least 95%, at least 96%, at least 97%, at least 98%, at least 99%, at least 99.5%, or 100% identical to one or more of SEQ ID NOs: 180, 182, 184, 186, 188, 190, 192, 194, 196, 198, 200, 202, 204, 206 and/or 208. In some embodiments of this aspect, which may be combined with any of the preceding embodiments, the transcribable DNA sequence is, or comprises a sequence that is, at least 80%, at least 85%, at least 90%, at least 95%, at least 96%, at least 97%, at least 98%, at least 99%, at least 99.5%, or 100% identical to one or more of SEQ ID NOs: 179, 181, 183, 185, 187, 189, 191, 193, 195, 197, 199, 201, 203, 205 and/or 207. In some embodiments of this aspect, which may be combined with any of the preceding embodiments, the GA2 oxidase protein is, or comprises a sequence that is, at least 80%, at least 85%, at least 90%, at least 95%, at least 96%, at least 97%, at least 98%, at least 99%, at least 99.5%, or 100% identical to one or more of SEQ ID NOs: 210, 212, 214, 216, 218, 220, 222, 224, 226, 228, 230, 232, 234, 236 and/or 238. In some embodiments of this aspect, which may be combined with any of the preceding embodiments, the transcribable DNA sequence is, or comprises a sequence that is, at least 80%, at least 85%, at least 90%, at least 95%, at least 96%, at least 97%, at least 98%, at least 99%, at least 99.5%, or 100% identical to one or more of SEQ ID NOs: 209, 211, 213, 215, 217, 219, 221, 223, 225, 227, 229, 231, 233, 235 and/or 237. In some embodiments of this aspect, which may be combined with any of the preceding embodiments, the GA2 oxidase protein is, or comprises a sequence that is, at least 80%, at least 85%, at least 90%, at least 95%, at least 96%, at least 97%, at least 98%, at least 99%, at least 99.5%, or 100% identical to one or more of SEQ ID NOs: 240, 242, 244, 246, 248, 250 and/or 252. In some embodiments of this aspect, which may be combined with any of the preceding embodiments, the transcribable DNA sequence is, or comprises a sequence that is, at least 80%, at least 85%, at least 90%, at least 95%, at least 96%, at least 97%, at least 98%, at least 99%, at least 99.5%, or 100% identical to one or more of SEQ ID NOs: 239, 241, 243, 245, 247, 249 and/or 251. In some embodiments of this aspect, which may be combined with any of the preceding embodiments, the GA2 oxidase protein is, or comprises a sequence that is, at least 80%, at least 85%, at least 90%, at least 95%, at least 96%, at least 97%, at least 98%, at least 99%, at least 99.5%, or 100% identical to one or more of SEQ ID NOs: 254, 256, 258, 260, 262, 264 and/or 266. In some embodiments of this aspect, which may be combined with any of the preceding embodiments, the transcribable DNA sequence is, or comprises a sequence that is, at least 80%, at least 85%, at least 90%, at least 95%, at least 96%, at least 97%, at least 98%, at least 99%, at least 99.5%, or 100% identical to one or more of SEQ ID NOs: 253, 255, 257, 259, 261, 263 and/or 265. In some embodiments of this aspect, which may be combined with any of the preceding embodiments, the GA2 oxidase protein is, or comprises a sequence that is, at least 80%, at least 85%, at least 90%, at least 95%, at least 96%, at least 97%, at least 98%, at least 99%, at least 99.5%, or 100% identical to one or more of SEQ ID NOs: 268, 270, 272, 274, 276, 278, 280, 282 and/or 284. In some embodiments of this aspect, which may be combined with any of the preceding embodiments, the transcribable DNA sequence is, or comprises a sequence that is, at least 80%, at least 85%, at least 90%, at least 95%, at least 96%, at least 97%, at least 98%, at least 99%, at least 99.5%, or 100% identical to one or more of SEQ ID NOs: 267, 269, 271, 273, 275, 277, 279, 281 and/or 283. In some embodiments of this aspect, which may be combined with any of the preceding embodiments, the GA2 oxidase protein is, or comprises a sequence that is, at least 80%, at least 85%, at least 90%, at least 95%, at least 96%, at least 97%, at least 98%, at least 99%, at least 99.5%, or 100% identical to one or more of SEQ ID NOs: 286, 288, 290 and/or 292. In some embodiments of this aspect, which may be combined with any of the preceding embodiments, the transcribable DNA sequence is, or comprises a sequence that is, at least 80%, at least 85%, at least 90%, at least 95%, at least 96%, at least 97%, at least 98%, at least 99%, at least 99.5%, or 100% identical to one or more of SEQ ID NOs: 285, 287, 289 and/or 291. In some embodiments of this aspect, which may be combined with any of the preceding embodiments, the GA2 oxidase protein is, or comprises a sequence that is, at least 80%, at least 85%, at least 90%, at least 95%, at least 96%, at least 97%, at least 98%, at least 99%, at least 99.5%, or 100% identical to one or more of SEQ ID NOs: 294, 296, 298, 300, 302, 304, 306 and/or 308. In some embodiments of this aspect, which may be combined with any of the preceding embodiments, the transcribable DNA sequence is, or comprises a sequence that is, at least 80%, at least 85%, at least 90%, at least 95%, at least 96%, at least 97%, at least 98%, at least 99%, at least 99.5%, or 100% identical to one or more of SEQ ID NOs: 293, 295, 297, 299, 301, 303, 305 and/or 307. In some embodiments of this aspect, which may be combined with any of the preceding embodiments, the GA2 oxidase protein is, or comprises a sequence that is, at least 80%, at least 85%, at least 90%, at least 95%, at least 96%, at least 97%, at least 98%, at least 99%, at least 99.5%, or 100% identical to one or more of SEQ ID NOs: 310, 312, 314, 316, 318, 320 and/or 322. In some embodiments of this aspect, which may be combined with any of the preceding embodiments, the transcribable DNA sequence is, or comprises a sequence that is, at least 80%, at least 85%, at least 90%, at least 95%, at least 96%, at least 97%, at least 98%, at least 99%, at least 99.5%, or 100% identical to one or more of SEQ ID NOs: 309, 311, 313, 315, 317, 319 and/or 321. In some embodiments of this aspect, which may be combined with any of the preceding embodiments, the GA2 oxidase protein is, or comprises a sequence that is, at least 80%, at least 85%, at least 90%, at least 95%, at least 96%, at least 97%, at least 98%, at least 99%, at least 99.5%, or 100% identical to one or more of SEQ ID NOs: 324 and/or 326. In some embodiments of this aspect, which may be combined with any of the preceding embodiments, the transcribable DNA sequence is, or comprises a sequence that is, at least 80%, at least 85%, at least 90%, at least 95%, at least 96%, at least 97%, at least 98%, at least 99%, at least 99.5%, or 100% identical to one or more of SEQ ID NOs: 323 and/or 325. In some embodiments of this aspect, which may be combined with any of the preceding embodiments, the GA2 oxidase protein is, or comprises a sequence that is, at least 80%, at least 85%, at least 90%, at least 95%, at least 96%, at least 97%, at least 98%, at least 99%, at least 99.5%, or 100% identical to one or more of SEQ ID NOs: 328, 330 and/or 332. In some embodiments of this aspect, which may be combined with any of the preceding embodiments, the transcribable DNA sequence is, or comprises a sequence that is, at least 80%, at least 85%, at least 90%, at least 95%, at least 96%, at least 97%, at least 98%, at least 99%, at least 99.5%, or 100% identical to one or more of SEQ ID NOs: 327, 329 and/or 331.

[0007] In some embodiments of this aspect, which may be combined with any of the preceding embodiments, the plant-expressible promoter is a vascular promoter. In some embodiments, the vascular promoter comprises one of the following: a sucrose synthase promoter, a sucrose transporter promoter, a Sh1 promoter, Commelina yellow mottle virus (CoYMV) promoter, a wheat dwarf geminivirus (WDV) large intergenic region (LIR) promoter, a maize streak geminivirus (MSV) coat protein (CP) promoter, a rice yellow stripe 1 (YS1)-like promoter, or a rice yellow stripe 2 (OsYSL2) promoter. In certain embodiments, the vascular promoter comprises a DNA sequence that is at least 80%, at least 85%, at least 90%, at least 95%, at least 96%, at least 97%, at least 98%, at least 99%, at least 99.5% or 100% identical to one or more of SEQ ID NO: 335, SEQ ID NO: 336, SEQ ID NO: 337, SEQ ID NO: 338, or SEQ ID NO: 339, or a functional portion thereof.

[0008] In some embodiments of this aspect, which may be combined with any of the preceding embodiments, the plant-expressible promoter is a RTBV promoter. In certain embodiments wherein the plant-expressible promoter is a RTBV promoter, the plant-expressible promoter comprises a DNA sequence that is at least 80%, at least 85%, at least 90%, at least 95%, at least 96%, at least 97%, at least 98%, at least 99%, at least 99.5% or 100% identical to one or more of SEQ ID NO: 333 or SEQ ID NO: 334, or a functional portion thereof.

[0009] In some embodiments of this aspect, which may be combined with any of the preceding embodiments, the plant-expressible promoter is a leaf promoter. In some embodiments, the leaf promoter comprises one of the following: a RuBisCO promoter, a PPDK promoter, a FDA promoter, a Nadh-Gogat promoter, a chlorophyll a/b binding protein gene promoter, a phosphoenolpyruvate carboxylase (PEPC) promoter, or a Myb gene promoter. In certain embodiments, the leaf promoter comprises a DNA sequence that is at least 80%, at least 85%, at least 90%, at least 95%, at least 96%, at least 97%, at least 98%, at least 99%, at least 99.5% or 100% identical to one or more of SEQ ID NO: 340, SEQ ID NO: 341 or SEQ ID NO: 342, or a functional portion thereof.

[0010] In some embodiments of this aspect, which may be combined with any of the preceding embodiments, the plant-expressible promoter is a constitutive promoter. In some embodiments, the constitutive promoter is selected from the group consisting of: an actin promoter, a CaMV 35S or 19S promoter, a plant ubiquitin promoter, a plant Gos2 promoter, a FMV promoter, a CMV promoter, a MMV promoter, a PCLSV promoter, an Emu promoter, a tubulin promoter, a nopaline synthase promoter, an octopine synthase promoter, a mannopine synthase promoter, or a maize alcohol dehydrogenase, or a functional portion thereof. In certain embodiments, the constitutive promoter comprises a DNA sequence that is at least 80%, at least 85%, at least 90%, at least 95%, at least 96%, at least 97%, at least 98%, at least 99%, at least 99.5% or 100% identical to one or more of SEQ ID NOs: 343, SEQ ID NO: 344, SEQ ID NO: 345, SEQ ID NO: 346, SEQ ID NO: 347, SEQ ID NO: 348, SEQ ID NO: 349, SEQ ID NO: 350 or SEQ ID NO: 351, or a functional portion thereof.

[0011] In another aspect, provided herein is a transformation vector comprising the recombinant DNA construct of any one of the preceding embodiments.

[0012] In yet another aspect, provided herein is a transgenic corn plant, plant part or plant cell comprising the recombinant DNA construct of any one of the preceding embodiments stably integrated into the genome of the transgenic corn plant, plant part or plant cell. In some embodiments of this aspect, the transgenic corn plant has one or more of the following traits relative to a control plant: shorter plant height, increased stalk/stem diameter, improved lodging resistance, reduced green snap, deeper roots, increased leaf area, earlier canopy closure, higher stomatal conductance, lower ear height, increased foliar water content, improved drought tolerance, improved nitrogen use efficiency, reduced anthocyanin content and area in leaves under normal or nitrogen-limiting or water-limiting stress conditions, increased ear weight, increased harvest index, increased yield, increased seed number, increased seed weight, and/or increased prolificacy. In some embodiments of this aspect, which may be combined with any one of the preceding embodiments, the transgenic corn plant has a shorter plant height and/or improved lodging resistance. In some embodiments of this aspect, which may be combined with any one of the preceding embodiments, the height of the transgenic corn plant is at least 10%, at least 20%, at least 25%, at least 30%, at least 35%, or at least 40% shorter than a wild-type control plant. In some embodiments of this aspect, which may be combined with any one of the preceding embodiments, the stalk or stem diameter of the transgenic corn plant at one or more stem internodes is at least 5%, at least 10%, at least 15%, at least 20%, at least 25%, at least 30%, at least 35%, or at least 40% greater than the stalk or stem diameter at the same one or more internodes of a wild-type control plant. In some embodiments of this aspect, which may be combined with any one of the preceding embodiments, the stalk or stem diameter of the transgenic corn plant at one or more of the first, second, third, and/or fourth internode below the ear is at least 5%, at least 10%, at least 15%, at least 20%, at least 25%, at least 30%, at least 35%, or at least 40% greater than the same internode of a wild-type control plant. In some embodiments of this aspect, which may be combined with any one of the preceding embodiments, the level of one or more active GAs in at least one internode tissue of the stem or stalk of the transgenic corn plant is lower than the same internode tissue of a wild-type control plant. In some embodiments of this aspect, which may be combined with any one of the preceding embodiments, the level of one or more active GAs in at least one internode tissue of the stem or stalk of the transgenic corn plant is at least 5%, at least 10%, at least 15%, at least 20%, at least 25%, at least 30%, at least 35%, or at least 40% lower than the same internode tissue of a wild-type control plant. In some embodiments of this aspect, which may be combined with any one of the preceding embodiments, the transgenic corn plant does not have any significant off-types in at least one female organ or ear.

[0013] In still another aspect, provided herein is a bacterial or host cell comprising recombinant DNA construct of any one of the preceding embodiments.

[0014] In yet another aspect, provided herein is a method for producing a transgenic corn plant, comprising: (a) transforming at least one cell of an explant with recombinant DNA construct of any one of the preceding embodiments, and (b) regenerating or developing the transgenic corn plant comprising the recombinant DNA construct from the transformed explant. In some embodiments of this aspect, the at least one cell of an explant is transformed via Agrobacterium mediated transformation or particle bombardment. In some embodiments of this aspect, the at least one cell of an explant is transformed via site-directed integration using a targeted genome editing technique. In some embodiments, the at least one cell of an explant is transformed using a recombinant DNA donor template comprising at least one homology arm and an insertion sequence, wherein the at least one homology arm is complementary to a target site in the genome of a corn plant, wherein the insertion sequence comprises a recombinant DNA construct comprising a transcribable DNA sequence encoding a GA2 oxidase mRNA and protein, wherein the transcribable DNA sequence is operably linked to a plant-expressible promoter, and wherein the insertion sequence comprising the recombinant DNA construct is stably integrated into the genome of the transgenic corn plant. In certain embodiments, the at least one homology arm is complementary to at least 20, at least 25, at least 30, at least 35, at least 40, at least 45, at least 50, at least 60, at least 70, at least 80, at least 90, at least 100, at least 150, at least 200, at least 250, at least 500, at least 1000, at least 2500, or at least 5000 consecutive nucleotides of a target site in the genome of a corn plant. In some embodiments, the at least one homology arm is at least 70%, at least 75%, at least 80%, at least 85%, at least 90%, at least 95%, at least 96%, at least 97%, at least 99% or 100% complementary to at least 20, at least 25, at least 30, at least 35, at least 40, at least 45, at least 50, at least 60, at least 70, at least 80, at least 90, at least 100, at least 150, at least 200, at least 250, at least 500, at least 1000, at least 2500, or at least 5000 consecutive nucleotides of a target site in the genome of a corn plant. In some embodiments of this aspect, which may be combined with any of the preceding embodiments, the at least one cell of an explant is transformed using a site-specific nuclease. In some embodiments, the site-specific nuclease is a meganuclease, a zinc-finger nuclease (ZFN), a RNA-guided endonuclease, a TALE-endonuclease (TALEN), a recombinase, or a transposase. In certain embodiments, the site-specific nuclease is an RNA-guided endonuclease. In some embodiments, the at least one cell of an explant is further transformed using a guide RNA (gRNA) molecule. In some embodiments, the RNA-guided endonuclease in association with the guide RNA molecule causes a double strand break or nick at or near the target DNA sequence of the guide RNA in the genome of the corn plant to direct the integration of the insertion sequence into the genome of the transgenic corn plant at or near the target DNA sequence of the guide RNA. In certain embodiments, the guide RNA molecule is a CRISPR RNA (crRNA) or a single-chain guide RNA (sgRNA). In some embodiments, the guide RNA comprises a sequence complementary to a protospacer adjacent motif (PAM) sequence present in the genome of the transgenic corn plant immediately adjacent to the target DNA sequence. In some embodiments of this aspect, which may be combined with any of the preceding embodiments, target site of the homology arm in the genome of a corn plant is at or near the target site or target DNA sequence of the site-specific nuclease and/or the guide RNA. In some embodiments of this aspect, which may be combined with any of the preceding embodiments, the method further comprises (c) selecting a transgenic corn plant comprising the recombinant DNA construct. In some embodiments, the selecting step (c) comprises determining if the recombinant DNA construct was transformed or integrated into the genome of the transgenic corn plant using a molecular assay. In other embodiments, the selecting step (c) comprises determining if the recombinant DNA construct was transformed or integrated into the genome of the transgenic corn plant by observing a plant phenotype.

[0015] In still another aspect, provided herein is a recombinant DNA donor template comprising at least one homology arm and an insertion sequence, wherein the at least one homology arm is at least 70%, at least 75%, at least 80%, at least 85%, at least 90%, at least 95%, at least 96%, at least 97%, at least 99% or 100% complementary to at least 20, at least 25, at least 30, at least 35, at least 40, at least 45, at least 50, at least 60, at least 70, at least 80, at least 90, at least 100, at least 150, at least 200, at least 250, at least 500, at least 1000, at least 2500, or at least 5000 consecutive nucleotides of a target site in the genome of a corn plant, wherein the insertion sequence comprises a recombinant DNA construct comprising a transcribable DNA sequence encoding a GA2 oxidase mRNA and protein and a plant expressible promoter, and wherein the transcribable DNA sequence is operably linked to the plant-expressible promoter. which may be combined with any of the preceding embodiments, the at least one homology arm comprises two homology arms including a first homology arm and a second homology arm, wherein the first homology arm comprises a sequence that is at least 70%, at least 75%, at least 80%, at least 85%, at least 90%, at least 95%, at least 96%, at least 97%, at least 99% or 100% complementary to at least 20, at least 25, at least 30, at least 35, at least 40, at least 45, at least 50, at least 60, at least 70, at least 80, at least 90, at least 100, at least 150, at least 200, at least 250, at least 500, at least 1000, at least 2500, or at least 5000 consecutive nucleotides of a first flanking DNA sequence, and the second homology arm comprises a sequence that is at least 70%, at least 75%, at least 80%, at least 85%, at least 90%, at least 95%, at least 96%, at least 97%, at least 99% or 100% complementary to at least 20, at least 25, at least 30, at least 35, at least 40, at least 45, at least 50, at least 60, at least 70, at least 80, at least 90, at least 100, at least 150, at least 200, at least 250, at least 500, at least 1000, at least 2500, or at least 5000 consecutive nucleotides of a second flanking DNA sequence, wherein the first flanking DNA sequence and the second flanking DNA sequence are genomic sequences at or near the same genomic locus of a corn plant, and wherein the insertion sequence is located between the first homology arm and the second homology arm.

[0016] In yet another aspect, provided herein is a composition comprising the recombinant DNA donor template of any one of the embodiments of the preceding aspect. In still another aspect, provided herein is a composition comprising the recombinant DNA donor template of any one of the embodiments of the preceding aspects and a site-specific nuclease. In some embodiments of this aspect, the composition further comprises a guide RNA.

[0017] In still another aspect, provided herein is a DNA molecule or vector comprising the recombinant DNA donor template of any one of the embodiments of the preceding aspect. In some embodiments of this aspect, the DNA molecule or vector further comprises a polynucleotide sequence encoding a site-specific nuclease. In some embodiments of this aspect, which may be combined with any of the preceding embodiments, the DNA molecule or vector further comprises a polynucleotide sequence encoding a guide RNA.

[0018] In yet another aspect, provided herein is a composition comprising the DNA molecule or vector of any one of the embodiments of the preceding aspect. In still another aspect, provided herein is a composition comprising the DNA molecule or vector of any one of the embodiments of the preceding aspects and a site-specific nuclease. In some embodiments of this aspect, the composition further comprises a guide RNA.

[0019] In still another aspect, provided herein is a composition comprising a first DNA molecule or vector and a second DNA molecule or vector, wherein the first DNA molecule or vector comprises the recombinant DNA donor template of any one of the embodiments of the preceding aspects, and the second DNA molecule or vector comprises a polynucleotide sequence encoding a site-specific nuclease. In some embodiments of this aspect, the first DNA molecule or vector or the second DNA molecule or vector comprises a polynucleotide sequence encoding a guide RNA.

[0020] In yet another aspect, provided herein is a composition comprising a first DNA molecule or vector and a second DNA molecule or vector, wherein the first DNA molecule or vector comprises the recombinant DNA donor template of any one of the embodiments of the preceding aspects, and the second DNA molecule or vector comprises a polynucleotide sequence encoding a guide RNA.

[0021] In still another aspect, provided herein is a transgenic corn plant, plant part or plant cell comprising the insertion sequence of the recombinant DNA donor template of any one of the embodiments of the preceding aspects.

[0022] Certain aspects of the disclosure include:

[0023] Aspect A1: A recombinant DNA construct comprising a transcribable DNA sequence encoding a GA2 oxidase protein and a plant-expressible promoter, wherein the transcribable DNA sequence is operably linked to the plant-expressible promoter.

[0024] Aspect A2: The recombinant DNA construct of Aspect A1, wherein the GA2 oxidase protein is, or comprises a sequence that is, at least 80%, at least 85%, at least 90%, at least 95%, at least 96%, at least 97%, at least 98%, at least 99%, at least 99.5%, or 100% identical to one or more of SEQ ID NOs: 2, 4, 6, 8, 10, 12, 14, 16, 18, 20, 22, 24 and/or 26.

[0025] Aspect A3: The recombinant DNA construct of Aspect A1 or A2, wherein the transcribable DNA sequence is, or comprises a sequence that is, at least 80%, at least 85%, at least 90%, at least 95%, at least 96%, at least 97%, at least 98%, at least 99%, at least 99.5%, or 100% identical to one or more of SEQ ID NOs: 1, 3, 5, 7, 9, 11, 13, 15, 17, 19, 21, 23 and/or 25.

[0026] Aspect A4: The recombinant DNA construct of any one of Aspects A1-A3, wherein the GA2 oxidase protein is, or comprises a sequence that is, at least 80%, at least 85%, at least 90%, at least 95%, at least 96%, at least 97%, at least 98%, at least 99%, at least 99.5%, or 100% identical to one or more of SEQ ID NOs: 28, 30, 32, 34, 36, 38, 40, 42, 44 and/or 46.

[0027] Aspect A5: The recombinant DNA construct of any one of Aspects A1-A4, wherein the transcribable DNA sequence is, or comprises a sequence that is, at least 80%, at least 85%, at least 90%, at least 95%, at least 96%, at least 97%, at least 98%, at least 99%, at least 99.5%, or 100% identical to one or more of SEQ ID NOs: 27, 29, 31, 33, 35, 37, 39, 41, 43 and/or 45.

[0028] Aspect A6: The recombinant DNA construct of any one of Aspects A1-A5, wherein the GA2 oxidase protein is, or comprises a sequence that is, at least 80%, at least 85%, at least 90%, at least 95%, at least 96%, at least 97%, at least 98%, at least 99%, at least 99.5%, or 100% identical to one or more of SEQ ID NOs: 48, 50, 52, 54, 56, 58, 60 and/or 62.

[0029] Aspect A7: The recombinant DNA construct of any one of Aspects A1-A6, wherein the transcribable DNA sequence is, or comprises a sequence that is, at least 80%, at least 85%, at least 90%, at least 95%, at least 96%, at least 97%, at least 98%, at least 99%, at least 99.5%, or 100% identical to one or more of SEQ ID NOs: 47, 49, 51, 53, 55, 57, 59 and/or 61.

[0030] Aspect A8: The recombinant DNA construct of any one of Aspects A1-A7, wherein the GA2 oxidase protein is, or comprises a sequence that is, at least 80%, at least 85%, at least 90%, at least 95%, at least 96%, at least 97%, at least 98%, at least 99%, at least 99.5%, or 100% identical to one or more of SEQ ID NOs: 64, 66, 68, 70, 72, 74, 76, 78, 80, 82, 84, 86, 88, 90, 92 and/or 94.

[0031] Aspect A9: The recombinant DNA construct of any one of Aspects A1-A8, wherein the transcribable DNA sequence is, or comprises a sequence that is, at least 80%, at least 85%, at least 90%, at least 95%, at least 96%, at least 97%, at least 98%, at least 99%, at least 99.5%, or 100% identical to one or more of SEQ ID NOs: 63, 65, 67, 69, 71, 73, 75, 77, 79, 81, 83, 85, 87, 89, 91 and/or 93.

[0032] Aspect A10: The recombinant DNA construct of any one of Aspects A1-A9, wherein the plant-expressible promoter is a vascular promoter.

[0033] Aspect A11: The recombinant DNA construct of Aspect A10, wherein the vascular promoter comprises one of the following: a sucrose synthase promoter, a sucrose transporter promoter, a Sh1 promoter, Commelina yellow mottle virus (CoYMV) promoter, a wheat dwarf geminivirus (WDV) large intergenic region (LIR) promoter, a maize streak geminivirus (MSV) coat protein (CP) promoter, a rice yellow stripe 1 (YS1)-like promoter, or a rice yellow stripe 2 (OsYSL2) promoter.

[0034] Aspect A12: The recombinant DNA construct of Aspect A10, wherein the vascular promoter comprises a DNA sequence that is at least 80%, at least 85%, at least 90%, at least 95%, at least 96%, at least 97%, at least 98%, at least 99%, at least 99.5% or 100% identical to one or more of SEQ ID NO: 335, SEQ ID NO: 336, SEQ ID NO: 337, SEQ ID NO: 338, or SEQ ID NO: 339, or a functional portion thereof.

[0035] Aspect A13: The recombinant DNA construct of any one of Aspects A1-A10, wherein the plant-expressible promoter is a RTBV promoter.

[0036] Aspect A14: The recombinant DNA construct of Aspect A13, wherein the plant-expressible promoter comprises a DNA sequence that is at least 80%, at least 85%, at least 90%, at least 95%, at least 96%, at least 97%, at least 98%, at least 99%, at least 99.5% or 100% identical to one or more of SEQ ID NO: 333 or SEQ ID NO: 334, or a functional portion thereof.

[0037] Aspect A15: The recombinant DNA construct of any one of Aspects A1-A9, wherein the plant-expressible promoter is a leaf promoter.

[0038] Aspect A16: The recombinant DNA construct of Aspect A15, wherein the leaf promoter comprises one of the following: a RuBisCO promoter, a PPDK promoter, a FDA promoter, a Nadh-Gogat promoter, a chlorophyll a/b binding protein gene promoter, a phosphoenolpyruvate carboxylase (PEPC) promoter, or a Myb gene promoter.

[0039] Aspect A17: The recombinant DNA construct of Aspect A15, wherein the leaf promoter comprises a DNA sequence that is at least 80%, at least 85%, at least 90%, at least 95%, at least 96%, at least 97%, at least 98%, at least 99%, at least 99.5% or 100% identical to one or more of SEQ ID NO: 340, SEQ ID NO: 341 or SEQ ID NO: 342, or a functional portion thereof.

[0040] Aspect A18: The recombinant DNA construct of any one of Aspects A1-A9, wherein the plant-expressible promoter is a constitutive promoter.

[0041] Aspect A19: The recombinant DNA construct of Aspect A18, wherein the constitutive promoter is selected from the group consisting of: an actin promoter, a CaMV 35S or 19S promoter, a plant ubiquitin promoter, a plant Gos2 promoter, a FMV promoter, a CMV promoter, a MMV promoter, a PCLSV promoter, an Emu promoter, a tubulin promoter, a nopaline synthase promoter, an octopine synthase promoter, a mannopine synthase promoter, or a maize alcohol dehydrogenase, or a functional portion thereof.

[0042] Aspect A20: The recombinant DNA construct of Aspect A18, wherein the constitutive promoter comprises a DNA sequence that is at least 80%, at least 85%, at least 90%, at least 95%, at least 96%, at least 97%, at least 98%, at least 99%, at least 99.5% or 100% identical to one or more of SEQ ID NOs: 343, SEQ ID NO: 344, SEQ ID NO: 345, SEQ ID NO: 346, SEQ ID NO: 347, SEQ ID NO: 348, SEQ ID NO: 349, SEQ ID NO: 350 or SEQ ID NO: 351, or a functional portion thereof.

[0043] Aspect A21: A transformation vector comprising the recombinant DNA construct of any one of Aspects A1-A20.

[0044] Aspect A22: A transgenic corn plant, plant part or plant cell comprising the recombinant DNA construct of any one of Aspects A1-A20 stably integrated into the genome of the transgenic corn plant, plant part or plant cell.

[0045] Aspect A23: The transgenic corn plant of Aspect A22, wherein the transgenic corn plant has one or more of the following traits relative to a control plant: shorter plant height, increased stalk/stem diameter, improved lodging resistance, reduced green snap, deeper roots, increased leaf area, earlier canopy closure, higher stomatal conductance, lower ear height, increased foliar water content, improved drought tolerance, improved nitrogen use efficiency, reduced anthocyanin content and area in leaves under normal or nitrogen-limiting or water-limiting stress conditions, increased ear weight, increased harvest index, increased yield, increased seed number, increased seed weight, and/or increased prolificacy.

[0046] Aspect A24: The transgenic corn plant of Aspect A22 or A23, wherein the transgenic corn plant has a shorter plant height and/or improved lodging resistance.

[0047] Aspect A25: The transgenic corn plant of any one of Aspects A22-A24, wherein the height of the transgenic corn plant is at least 10%, at least 20%, at least 25%, at least 30%, at least 35%, or at least 40% shorter than a wild-type control plant.

[0048] Aspect A26: The transgenic corn plant of any one of Aspects A22-A25, wherein the stalk or stem diameter of the transgenic corn plant at one or more stem internodes is at least 5%, at least 10%, at least 15%, at least 20%, at least 25%, at least 30%, at least 35%, or at least 40% greater than the stalk or stem diameter at the same one or more internodes of a wild-type control plant.

[0049] Aspect A27: The transgenic corn plant of any one of Aspects A22-A26, wherein the stalk or stem diameter of the transgenic corn plant at one or more of the first, second, third, and/or fourth internode below the ear is at least 5%, at least 10%, at least 15%, at least 20%, at least 25%, at least 30%, at least 35%, or at least 40% greater than the same internode of a wild-type control plant.

[0050] Aspect A28: The transgenic corn plant of any one of Aspects A22-A27, wherein the level of one or more active GAs in at least one internode tissue of the stem or stalk of the transgenic corn plant is lower than the same internode tissue of a wild-type control plant.

[0051] Aspect A29: The transgenic corn plant of any one of Aspects A22-A28, wherein the level of one or more active GAs in at least one internode tissue of the stem or stalk of the transgenic corn plant is at least 5%, at least 10%, at least 15%, at least 20%, at least 25%, at least 30%, at least 35%, or at least 40% lower than the same internode tissue of a wild-type control plant.

[0052] Aspect A30: The transgenic corn plant of any one of Aspects A22-A29, wherein the transgenic corn plant does not have any significant off-types in at least one female organ or ear.

[0053] Aspect A31: A bacterial or host cell comprising the recombinant DNA construct or vector of any one of Aspects A1-A21.

[0054] Aspect A32: A method for producing a transgenic corn plant, comprising: (a) transforming at least one cell of an explant with the recombinant DNA construct or vector of any one of Aspects A1-A21, and (b) regenerating or developing the transgenic corn plant comprising the recombinant DNA construct from the transformed explant.

[0055] Aspect A33: The method of Aspect A32, wherein the at least one cell of an explant is transformed via Agrobacterium mediated transformation or particle bombardment.

[0056] Aspect A34: The method of Aspect A32, wherein the at least one cell of an explant is transformed via site-directed integration using a targeted genome editing technique.

[0057] Aspect A35: The method of Aspect A34, wherein the at least one cell of an explant is transformed using a recombinant DNA donor template comprising at least one homology arm and an insertion sequence, wherein the at least one homology arm is complementary to a target site in the genome of a corn plant, wherein the insertion sequence comprises a recombinant DNA construct comprising a transcribable DNA sequence encoding a GA2 oxidase mRNA and protein, wherein the transcribable DNA sequence is operably linked to a plant-expressible promoter, and wherein the insertion sequence comprising the recombinant DNA construct is stably integrated into the genome of the transgenic corn plant.

[0058] Aspect A36: The method of Aspect A35, wherein the at least one homology arm is complementary to at least 20, at least 25, at least 30, at least 35, at least 40, at least 45, at least 50, at least 60, at least 70, at least 80, at least 90, at least 100, at least 150, at least 200, at least 250, at least 500, at least 1000, at least 2500, or at least 5000 consecutive nucleotides of a target site in the genome of a corn plant.

[0059] Aspect A37: The method of Aspect A35 or A36, wherein the at least one homology arm is at least 70%, at least 75%, at least 80%, at least 85%, at least 90%, at least 95%, at least 96%, at least 97%, at least 99% or 100% complementary to at least 20, at least 25, at least 30, at least 35, at least 40, at least 45, at least 50, at least 60, at least 70, at least 80, at least 90, at least 100, at least 150, at least 200, at least 250, at least 500, at least 1000, at least 2500, or at least 5000 consecutive nucleotides of a target site in the genome of a corn plant.

[0060] Aspect A38: The method of any one of Aspects A33-A37, wherein the at least one cell of an explant is transformed using a site-specific nuclease.

[0061] Aspect A39: The method of Aspect A38, wherein the site-specific nuclease is a meganuclease, a zinc-finger nuclease (ZFN), a RNAguided endonuclease, a TALE-endonuclease (TALEN), a recombinase, or a transposase.

[0062] Aspect A40: The method of Aspect A38, wherein the site-specific nuclease is an RNAguided endonuclease.

[0063] Aspect A41: The method of Aspect A40, wherein the at least one cell of an explant is further transformed using a guide RNA (gRNA) molecule.

[0064] Aspect A42: The method of Aspect A41, wherein the RNAguided endonuclease in association with the guide RNA molecule causes a double strand break or nick at or near the target DNA sequence of the guide RNA in the genome of the corn plant to direct the integration of the insertion sequence into the genome of the transgenic corn plant at or near the target DNA sequence of the guide RNA

[0065] Aspect A43: The method of Aspect A41 or A42, wherein the guide RNA molecule is a CRISPR RNA (crRNA) or a single-chain guide RNA (sgRNA).

[0066] Aspect A44: The method of any one of Aspects A41-A43, wherein the guide RNA comprises a sequence complementary to a protospacer adjacent motif (PAM) sequence present in the genome of the transgenic corn plant immediately adjacent to the target DNA sequence.

[0067] Aspect A45: The method of any one of Aspects A35-A44, wherein target site of the homology arm in the genome of a corn plant is at or near the target site or target DNA sequence of the site-specific nuclease and/or the guide RNA.

[0068] Aspect A46: The method of any one of Aspects A32-A45, further comprising: (c) selecting a transgenic corn plant comprising the recombinant DNA construct.

[0069] Aspect A47: The method of Aspect A46, wherein the selecting step (c) comprises determining if the recombinant DNA construct was transformed or integrated into the genome of the transgenic corn plant using a molecular assay.

[0070] Aspect A48: The method of Aspect A46, wherein the selecting step (c) comprises determining if the recombinant DNA construct was transformed or integrated into the genome of the transgenic corn plant by observing a plant phenotype.

[0071] Aspect A49: A recombinant DNA donor template comprising at least one homology arm and an insertion sequence, wherein the at least one homology arm is at least 70%, at least 75%, at least 80%, at least 85%, at least 90%, at least 95%, at least 96%, at least 97%, at least 99% or 100% complementary to at least 20, at least 25, at least 30, at least 35, at least 40, at least 45, at least 50, at least 60, at least 70, at least 80, at least 90, at least 100, at least 150, at least 200, at least 250, at least 500, at least 1000, at least 2500, or at least 5000 consecutive nucleotides of a target site in the genome of a corn plant, wherein the insertion sequence comprises a recombinant DNA construct comprising a transcribable DNA sequence encoding a GA2 oxidase mRNA and protein and a plant expressible promoter, and wherein the transcribable DNA sequence is operably linked to the plant-expressible promoter.

[0072] Aspect A50: The recombinant DNA donor template of Aspect A49, wherein the at least one homology arm comprises two homology arms including a first homology arm and a second homology arm, wherein the first homology arm comprises a sequence that is at least 70%, at least 75%, at least 80%, at least 85%, at least 90%, at least 95%, at least 96%, at least 97%, at least 99% or 100% complementary to at least 20, at least 25, at least 30, at least 35, at least 40, at least 45, at least 50, at least 60, at least 70, at least 80, at least 90, at least 100, at least 150, at least 200, at least 250, at least 500, at least 1000, at least 2500, or at least 5000 consecutive nucleotides of a first flanking DNA sequence, and the second homology arm comprises a sequence that is at least 70%, at least 75%, at least 80%, at least 85%, at least 90%, at least 95%, at least 96%, at least 97%, at least 99% or 100% complementary to at least 20, at least 25, at least 30, at least 35, at least 40, at least 45, at least 50, at least 60, at least 70, at least 80, at least 90, at least 100, at least 150, at least 200, at least 250, at least 500, at least 1000, at least 2500, or at least 5000 consecutive nucleotides of a second flanking DNA sequence, wherein the first flanking DNA sequence and the second flanking DNA sequence are genomic sequences at or near the same genomic locus of a corn plant, and wherein the insertion sequence is located between the first homology arm and the second homology arm.

[0073] Aspect A51: A DNA molecule or vector comprising the recombinant DNA donor template of Aspect A49 or A50.

[0074] Aspect A52: The DNA molecule or vector of Aspect A51, further comprising a polynucleotide sequence encoding a site-specific nuclease.

[0075] Aspect A53: The DNA molecule or vector of Aspect A51 or A52, further comprising a polynucleotide sequence encoding a guide RNA.

[0076] Aspect A54: A composition comprising the DNA molecule or vector and/or the recombinant DNA donor template of any one of Aspects A49-A53 and a guide RNA.

[0077] Aspect A55: A composition comprising the DNA molecule or vector and/or the recombinant DNA donor template of any one of Aspects A49-A53 and a site-specific nuclease.

[0078] Aspect A56: The composition of Aspect A55, further comprising a guide RNA.

[0079] Aspect A57: A composition comprising a first DNA molecule or vector and a second DNA molecule or vector, wherein the first DNA molecule or vector comprises the recombinant DNA donor template of Aspect A49 or A50 and the second DNA molecule or vector comprises a polynucleotide sequence encoding a site-specific nuclease.

[0080] Aspect A58: The composition of Aspect A57, wherein the first DNA molecule or vector or the second DNA molecule or vector comprises a polynucleotide sequence encoding a guide RNA.

[0081] Aspect A59: A composition comprising a first DNA molecule or vector and a second DNA molecule or vector, wherein the first DNA molecule or vector comprises the recombinant DNA donor template of Aspect A49 or A50 and the second DNA molecule or vector comprises a polynucleotide sequence encoding a guide RNA.

[0082] Aspect A60: A transgenic corn plant, plant part or plant cell comprising the insertion sequence of the recombinant DNA donor template of any one of Aspects A49-A53.

[0083] Aspect B1: A recombinant DNA construct comprising a transcribable DNA sequence encoding a GA2 oxidase protein and a plant-expressible promoter, wherein the transcribable DNA sequence is operably linked to the plant-expressible promoter.

[0084] Aspect B2: The recombinant DNA construct of Aspect B1, wherein the GA2 oxidase protein is, or comprises a sequence that is, at least 80%, at least 85%, at least 90%, at least 95%, at least 96%, at least 97%, at least 98%, at least 99%, at least 99.5%, or 100% identical to one or more of SEQ ID NOs: 2, 4, 6, 8, 10, 12, 14, 16, 18, 20, 22, 24 and/or 26.

[0085] Aspect B3: The recombinant DNA construct of Aspect B1 or B2, wherein the transcribable DNA sequence is, or comprises a sequence that is, at least 80%, at least 85%, at least 90%, at least 95%, at least 96%, at least 97%, at least 98%, at least 99%, at least 99.5%, or 100% identical to one or more of SEQ ID NOs: 1, 3, 5, 7, 9, 11, 13, 15, 17, 19, 21, 23 and/or 25.

[0086] Aspect B4: The recombinant DNA construct of any one of Aspects B1-B3, wherein the GA2 oxidase protein is, or comprises a sequence that is, at least 80%, at least 85%, at least 90%, at least 95%, at least 96%, at least 97%, at least 98%, at least 99%, at least 99.5%, or 100% identical to one or more of SEQ ID NOs: 28, 30, 32, 34, 36, 38, 40, 42, 44 and/or 46.

[0087] Aspect B5: The recombinant DNA construct of any one of Aspects B1-B4, wherein the transcribable DNA sequence is, or comprises a sequence that is, at least 80%, at least 85%, at least 90%, at least 95%, at least 96%, at least 97%, at least 98%, at least 99%, at least 99.5%, or 100% identical to one or more of SEQ ID NOs: 27, 29, 31, 33, 35, 37, 39, 41, 43 and/or 45.

[0088] Aspect B6: The recombinant DNA construct of any one of Aspects B1-B5, wherein the GA2 oxidase protein is, or comprises a sequence that is, at least 80%, at least 85%, at least 90%, at least 95%, at least 96%, at least 97%, at least 98%, at least 99%, at least 99.5%, or 100% identical to one or more of SEQ ID NOs: 48, 50, 52, 54, 56, 58, 60 and/or 62.

[0089] Aspect B7: The recombinant DNA construct of any one of Aspects B1-B6, wherein the transcribable DNA sequence is, or comprises a sequence that is, at least 80%, at least 85%, at least 90%, at least 95%, at least 96%, at least 97%, at least 98%, at least 99%, at least 99.5%, or 100% identical to one or more of SEQ ID NOs: 47, 49, 51, 53, 55, 57, 59 and/or 61.

[0090] Aspect B8: The recombinant DNA construct of any one of Aspects 1B-B7, wherein the GA2 oxidase protein is, or comprises a sequence that is, at least 80%, at least 85%, at least 90%, at least 95%, at least 96%, at least 97%, at least 98%, at least 99%, at least 99.5%, or 100% identical to one or more of SEQ ID NOs: 64, 66, 68, 70, 72, 74, 76, 78, 80, 82, 84, 86, 88, 90, 92 and/or 94.

[0091] Aspect B9: The recombinant DNA construct of any one of Aspects B1-B8, wherein the transcribable DNA sequence is, or comprises a sequence that is, at least 80%, at least 85%, at least 90%, at least 95%, at least 96%, at least 97%, at least 98%, at least 99%, at least 99.5%, or 100% identical to one or more of SEQ ID NOs: 63, 65, 67, 69, 71, 73, 75, 77, 79, 81, 83, 85, 87, 89, 91 and/or 93.

[0092] Aspect B10: The recombinant DNA construct of any one of Aspects B1-B9, wherein the GA2 oxidase protein is, or comprises a sequence that is, at least 80%, at least 85%, at least 90%, at least 95%, at least 96%, at least 97%, at least 98%, at least 99%, at least 99.5%, or 100% identical to one or more of SEQ ID NOs: 96, 98, 100, 102, 104, 106, 108, 110, 112, 114, 116, 118, 120, 122 and/or 124.

[0093] Aspect B11: The recombinant DNA construct of any one of Aspects B1-B10, wherein the transcribable DNA sequence is, or comprises a sequence that is, at least 80%, at least 85%, at least 90%, at least 95%, at least 96%, at least 97%, at least 98%, at least 99%, at least 99.5%, or 100% identical to one or more of SEQ ID NOs: 95, 97, 99, 101, 103, 105, 107, 109, 111, 113, 115, 117, 119, 121 and/or 123.

[0094] Aspect B12: The recombinant DNA construct of any one of Aspects B1-B11, wherein the GA2 oxidase protein is, or comprises a sequence that is, at least 80%, at least 85%, at least 90%, at least 95%, at least 96%, at least 97%, at least 98%, at least 99%, at least 99.5%, or 100% identical to one or more of SEQ ID NOs: 126, 128, 130, 132, 134, 136, 138, 140, 142, 144 and/or 146.

[0095] Aspect B13: The recombinant DNA construct of any one of Aspects B1-B12, wherein the transcribable DNA sequence is, or comprises a sequence that is, at least 80%, at least 85%, at least 90%, at least 95%, at least 96%, at least 97%, at least 98%, at least 99%, at least 99.5%, or 100% identical to one or more of SEQ ID NOs: 125, 127, 129, 131, 133, 135, 137, 139, 141, 143 and/or 145.

[0096] Aspect B14: The recombinant DNA construct of any one of Aspects B1-B13, wherein the GA2 oxidase protein is, or comprises a sequence that is, at least 80%, at least 85%, at least 90%, at least 95%, at least 96%, at least 97%, at least 98%, at least 99%, at least 99.5%, or 100% identical to one or more of SEQ ID NOs: 148, 150, 152, 154, 156, 158, 160, 162, 164, 166, 168, 170, 172, 174, 176 and/or 178.

[0097] Aspect B15: The recombinant DNA construct of any one of Aspects B1-B14, wherein the transcribable DNA sequence is, or comprises a sequence that is, at least 80%, at least 85%, at least 90%, at least 95%, at least 96%, at least 97%, at least 98%, at least 99%, at least 99.5%, or 100% identical to one or more of SEQ ID NOs: 147, 149, 151, 153, 155, 157, 159, 161, 163, 165, 167, 169, 171, 173, 175 and/or 177.

[0098] Aspect B16: The recombinant DNA construct of any one of Aspects B1-B15, wherein the GA2 oxidase protein is, or comprises a sequence that is, at least 80%, at least 85%, at least 90%, at least 95%, at least 96%, at least 97%, at least 98%, at least 99%, at least 99.5%, or 100% identical to one or more of SEQ ID NOs: 180, 182, 184, 186, 188, 190, 192, 194, 196, 198, 200, 202, 204, 206 and/or 208.

[0099] Aspect B17: The recombinant DNA construct of any one of Aspects B1-B16, wherein the transcribable DNA sequence is, or comprises a sequence that is, at least 80%, at least 85%, at least 90%, at least 95%, at least 96%, at least 97%, at least 98%, at least 99%, at least 99.5%, or 100% identical to one or more of SEQ ID NOs: 179, 181, 183, 185, 187, 189, 191, 193, 195, 197, 199, 201, 203, 205 and/or 207.

[0100] Aspect B18: The recombinant DNA construct of any one of Aspects B1-B17, wherein the GA2 oxidase protein is, or comprises a sequence that is, at least 80%, at least 85%, at least 90%, at least 95%, at least 96%, at least 97%, at least 98%, at least 99%, at least 99.5%, or 100% identical to one or more of SEQ ID NOs: 210, 212, 214, 216, 218, 220, 222, 224, 226, 228, 230, 232, 234, 236 and/or 238.

[0101] Aspect B19: The recombinant DNA construct of any one of Aspects B1-B18, wherein the transcribable DNA sequence is, or comprises a sequence that is, at least 80%, at least 85%, at least 90%, at least 95%, at least 96%, at least 97%, at least 98%, at least 99%, at least 99.5%, or 100% identical to one or more of SEQ ID NOs: 209, 211, 213, 215, 217, 219, 221, 223, 225, 227, 229, 231, 233, 235 and/or 237.

[0102] Aspect B20: The recombinant DNA construct of any one of Aspects B1-B19, wherein the GA2 oxidase protein is, or comprises a sequence that is, at least 80%, at least 85%, at least 90%, at least 95%, at least 96%, at least 97%, at least 98%, at least 99%, at least 99.5%, or 100% identical to one or more of SEQ ID NOs: 240, 242, 244, 246, 248, 250 and/or 252.

[0103] Aspect B21: The recombinant DNA construct of any one of Aspects 1-20, wherein the transcribable DNA sequence is, or comprises a sequence that is, at least 80%, at least 85%, at least 90%, at least 95%, at least 96%, at least 97%, at least 98%, at least 99%, at least 99.5%, or 100% identical to one or more of SEQ ID NOs: 239, 241, 243, 245, 247, 249 and/or 251.

[0104] Aspect B22: The recombinant DNA construct of any one of Aspects B1-B21, wherein the GA2 oxidase protein is, or comprises a sequence that is, at least 80%, at least 85%, at least 90%, at least 95%, at least 96%, at least 97%, at least 98%, at least 99%, at least 99.5%, or 100% identical to one or more of SEQ ID NOs: 254, 256, 258, 260, 262, 264 and/or 266.

[0105] Aspect B23: The recombinant DNA construct of any one of Aspects B1-B22, wherein the transcribable DNA sequence is, or comprises a sequence that is, at least 80%, at least 85%, at least 90%, at least 95%, at least 96%, at least 97%, at least 98%, at least 99%, at least 99.5%, or 100% identical to one or more of SEQ ID NOs: 253, 255, 257, 259, 261, 263 and/or 265.

[0106] Aspect B24: The recombinant DNA construct of any one of Aspects B1-B23, wherein the GA2 oxidase protein is, or comprises a sequence that is, at least 80%, at least 85%, at least 90%, at least 95%, at least 96%, at least 97%, at least 98%, at least 99%, at least 99.5%, or 100% identical to one or more of SEQ ID NOs: 268, 270, 272, 274, 276, 278, 280, 282 and/or 284.

[0107] Aspect B25: The recombinant DNA construct of any one of Aspects B1-B24, wherein the transcribable DNA sequence is, or comprises a sequence that is, at least 80%, at least 85%, at least 90%, at least 95%, at least 96%, at least 97%, at least 98%, at least 99%, at least 99.5%, or 100% identical to one or more of SEQ ID NOs: 267, 269, 271, 273, 275, 277, 279, 281 and/or 283.

[0108] Aspect B26: The recombinant DNA construct of any one of Aspects B1-B25, wherein the GA2 oxidase protein is, or comprises a sequence that is, at least 80%, at least 85%, at least 90%, at least 95%, at least 96%, at least 97%, at least 98%, at least 99%, at least 99.5%, or 100% identical to one or more of SEQ ID NOs: 286, 288, 290 and/or 292.

[0109] Aspect B27: The recombinant DNA construct of any one of Aspects B1-B26, wherein the transcribable DNA sequence is, or comprises a sequence that is, at least 80%, at least 85%, at least 90%, at least 95%, at least 96%, at least 97%, at least 98%, at least 99%, at least 99.5%, or 100% identical to one or more of SEQ ID NOs: 285, 287, 289 and/or 291.

[0110] Aspect B28: The recombinant DNA construct of any one of Aspects B1-B27, wherein the GA2 oxidase protein is, or comprises a sequence that is, at least 80%, at least 85%, at least 90%, at least 95%, at least 96%, at least 97%, at least 98%, at least 99%, at least 99.5%, or 100% identical to one or more of SEQ ID NOs: 294, 296, 298, 300, 302, 304, 306 and/or 308.

[0111] Aspect B29: The recombinant DNA construct of any one of Aspects B1-B28, wherein the transcribable DNA sequence is, or comprises a sequence that is, at least 80%, at least 85%, at least 90%, at least 95%, at least 96%, at least 97%, at least 98%, at least 99%, at least 99.5%, or 100% identical to one or more of SEQ ID NOs: 293, 295, 297, 299, 301, 303, 305 and/or 307.

[0112] Aspect B30: The recombinant DNA construct of any one of Aspects B1-B29, wherein the GA2 oxidase protein is, or comprises a sequence that is, at least 80%, at least 85%, at least 90%, at least 95%, at least 96%, at least 97%, at least 98%, at least 99%, at least 99.5%, or 100% identical to one or more of SEQ ID NOs: 310, 312, 314, 316, 318, 320 and/or 322.

[0113] Aspect B31: The recombinant DNA construct of any one of Aspects B1-B30, wherein the transcribable DNA sequence is, or comprises a sequence that is, at least 80%, at least 85%, at least 90%, at least 95%, at least 96%, at least 97%, at least 98%, at least 99%, at least 99.5%, or 100% identical to one or more of SEQ ID NOs: 309, 311, 313, 315, 317, 319 and/or 321.

[0114] Aspect B32: The recombinant DNA construct of any one of Aspects B1-B31, wherein the GA2 oxidase protein is, or comprises a sequence that is, at least 80%, at least 85%, at least 90%, at least 95%, at least 96%, at least 97%, at least 98%, at least 99%, at least 99.5%, or 100% identical to one or more of SEQ ID NOs: 324 and/or 326.

[0115] Aspect B33: The recombinant DNA construct of any one of Aspects B1-B32, wherein the transcribable DNA sequence is, or comprises a sequence that is, at least 80%, at least 85%, at least 90%, at least 95%, at least 96%, at least 97%, at least 98%, at least 99%, at least 99.5%, or 100% identical to one or more of SEQ ID NOs: 323 and/or 325.

[0116] Aspect B34: The recombinant DNA construct of any one of Aspects B1-B33, wherein the GA2 oxidase protein is, or comprises a sequence that is, at least 80%, at least 85%, at least 90%, at least 95%, at least 96%, at least 97%, at least 98%, at least 99%, at least 99.5%, or 100% identical to one or more of SEQ ID NOs: 328, 330 and/or 332.

[0117] Aspect B35: The recombinant DNA construct of any one of Aspects B1-B34, wherein the transcribable DNA sequence is, or comprises a sequence that is, at least 80%, at least 85%, at least 90%, at least 95%, at least 96%, at least 97%, at least 98%, at least 99%, at least 99.5%, or 100% identical to one or more of SEQ ID NOs: 327, 329 and/or 331.

[0118] Aspect B36: The recombinant DNA construct of any one of Aspects B1-B35, wherein the plant-expressible promoter is a vascular promoter.

[0119] Aspect B37: The recombinant DNA construct of Aspect B36, wherein the vascular promoter comprises one of the following: a sucrose synthase promoter, a sucrose transporter promoter, a Sh1 promoter, Commelina yellow mottle virus (CoYMV) promoter, a wheat dwarf geminivirus (WDV) large intergenic region (LIR) promoter, a maize streak geminivirus (MSV) coat protein (CP) promoter, a rice yellow stripe 1 (YS1)-like promoter, or a rice yellow stripe 2 (OsYSL2) promoter.

[0120] Aspect B38: The recombinant DNA construct of Aspect B36, wherein the vascular promoter com-prises a DNA sequence that is at least 80%, at least 85%, at least 90%, at least 95%, at least 96%, at least 97%, at least 98%, at least 99%, at least 99.5% or 100% identical to one or more of SEQ ID NO: 335, SEQ ID NO: 336, SEQ ID NO: 337, SEQ ID NO: 338, or SEQ ID NO: 339, or a functional portion thereof.

[0121] Aspect B39: The recombinant DNA construct of any one of Aspects B1-B38, wherein the plant-expressible promoter is a RTBV promoter.

[0122] Aspect B40: The recombinant DNA construct of Aspect 39, wherein the plant-expressible promoter comprises a DNA sequence that is at least 80%, at least 85%, at least 90%, at least 95%, at least 96%, at least 97%, at least 98%, at least 99%, at least 99.5% or 100% identical to one or more of SEQ ID NO: 333 or SEQ ID NO: 334, or a functional portion thereof.

[0123] Aspect B41: The recombinant DNA construct of any one of Aspects B1-B35, wherein the plant-expressible promoter is a leaf promoter.

[0124] Aspect B42: The recombinant DNA construct of Aspect B41, wherein the leaf promoter comprises one of the following: a RuBisCO promoter, a PPDK promoter, a FDA promoter, a Nadh-Gogat promoter, a chlorophyll a/b binding protein gene promoter, a phosphoenolpyruvate carboxylase (PEPC) promoter, or a Myb gene promoter.

[0125] Aspect B43: The recombinant DNA construct of Aspect B41, wherein the leaf promoter comprises a DNA sequence that is at least 80%, at least 85%, at least 90%, at least 95%, at least 96%, at least 97%, at least 98%, at least 99%, at least 99.5% or 100% identical to one or more of SEQ ID NO: 340, SEQ ID NO: 341 or SEQ ID NO: 342, or a functional portion thereof.

[0126] Aspect B44: The recombinant DNA construct of any one of Aspects B1-B35, wherein the plant-expressible promoter is a constitutive promoter.

[0127] Aspect B45: The recombinant DNA construct of Aspect B44, wherein the constitutive promoter is selected from the group consisting of: an actin promoter, a CaMV 35S or 19S pro-moter, a plant ubiquitin promoter, a plant Gos2 promoter, a FMV promoter, a CMV promoter, a MMV promoter, a PCLSV promoter, an Emu promoter, a tubulin pro-moter, a nopaline synthase promoter, an octopine synthase promoter, a mannopine synthase promoter, or a maize alcohol dehydrogenase, or a functional portion there-of.

[0128] Aspect B46: The recombinant DNA construct of Aspect B44, wherein the constitutive promoter comprises a DNA sequence that is at least 80%, at least 85%, at least 90%, at least 95%, at least 96%, at least 97%, at least 98%, at least 99%, at least 99.5% or 100% identical to one or more of SEQ ID NOs: 343, SEQ ID NO: 344, SEQ ID NO: 345, SEQ ID NO: 346, SEQ ID NO: 347, SEQ ID NO: 348, SEQ ID NO: 349, SEQ ID NO: 350 or SEQ ID NO: 351, or a functional portion thereof.

[0129] Aspect B47: A transformation vector comprising the recombinant DNA construct of any one of Aspects B1-B46.

[0130] Aspect B48: A transgenic corn plant, plant part or plant cell comprising the recombinant DNA construct of any one of Aspects B1-B46 stably integrated into the genome of the trans-genic corn plant, plant part or plant cell.

[0131] Aspect B49: The transgenic corn plant of Aspect B48, wherein the transgenic corn plant has one or more of the following traits relative to a control plant: shorter plant height, increased stalk/stem diameter, improved lodging resistance, reduced green snap, deeper roots, increased leaf area, earlier canopy closure, higher stomatal conductance, lower ear height, increased foliar water content, improved drought tolerance, improved nitro-gen use efficiency, reduced anthocyanin content and area in leaves under normal or nitrogen-limiting or water-limiting stress conditions, increased ear weight, increased harvest index, increased yield, increased seed number, increased seed weight, and/or increased prolificacy.

[0132] Aspect B50: The transgenic corn plant of Aspect B48 or B49, wherein the transgenic corn plant has a shorter plant height and/or improved lodging resistance.

[0133] Aspect B51: The transgenic corn plant of any one of Aspects B48-B50, wherein the height of the transgenic corn plant is at least 10%, at least 20%, at least 25%, at least 30%, at least 35%, or at least 40% shorter than a wild-type control plant.

[0134] Aspect B52: The transgenic corn plant of any one of Aspects B48-B51, wherein the stalk or stem diameter of the transgenic corn plant at one or more stem internodes is at least 5%, at least 10%, at least 15%, at least 20%, at least 25%, at least 30%, at least 35%, or at least 40% greater than the stalk or stem diameter at the same one or more internodes of a wild-type control plant.

[0135] Aspect B53: The transgenic corn plant of any one of Aspects B48-B52, wherein the stalk or stem diameter of the transgenic corn plant at one or more of the first, second, third, and/or fourth internode below the ear is at least 5%, at least 10%, at least 15%, at least 20%, at least 25%, at least 30%, at least 35%, or at least 40% greater than the same inter-node of a wild-type control plant.

[0136] Aspect B54: The transgenic corn plant of any one of Aspects B48-B53, wherein the level of one or more active GAs in at least one internode tissue of the stem or stalk of the transgenic corn plant is lower than the same internode tissue of a wild-type control plant.

[0137] Aspect B55: The transgenic corn plant of any one of Aspects B48-B54, wherein the level of one or more active GAs in at least one internode tissue of the stem or stalk of the transgenic corn plant is at least 5%, at least 10%, at least 15%, at least 20%, at least 25%, at least 30%, at least 35%, or at least 40% lower than the same internode tissue of a wild-type control plant.

[0138] Aspect B56: The transgenic corn plant of any one of Aspects B48-B55, wherein the transgenic corn plant does not have any significant off-types in at least one female organ or ear.

[0139] Aspect B57: A bacterial or host cell comprising the recombinant DNA construct or vector of any one of Aspects B1-B46.

[0140] Aspect B58: A method for producing a transgenic corn plant, comprising: (a) transforming at least one cell of an explant with the recombinant DNA construct or vector of any one of Aspects B1-B46, and (b) regenerating or developing the transgenic corn plant comprising the recombinant DNA construct from the transformed explant.

[0141] Aspect B59: The method of Aspect B58, wherein the at least one cell of an explant is transformed via Agrobacterium mediated transformation or particle bombardment.

[0142] Aspect B60: The method of Aspect B58, wherein the at least one cell of an explant is transformed via site-directed integration using a targeted genome editing technique.

[0143] Aspect B61: The method of Aspect B60, wherein the at least one cell of an explant is transformed using a recombinant DNA donor template comprising at least one homology arm and an insertion sequence, wherein the at least one homology arm is complementary to a target site in the genome of a corn plant, wherein the insertion sequence com-prises a recombinant DNA construct comprising a transcribable DNA sequence encoding a GA2 oxidase mRNA and protein, wherein the transcribable DNA sequence is operably linked to a plant-expressible promoter, and wherein the insertion se-quence comprising the recombinant DNA construct is stably integrated into the genome of the transgenic corn plant.

[0144] Aspect B62: The method of Aspect B61, wherein the at least one homology arm is complementary to at least 20, at least 25, at least 30, at least 35, at least 40, at least 45, at least 50, at least 60, at least 70, at least 80, at least 90, at least 100, at least 150, at least 200, at least 250, at least 500, at least 1000, at least 2500, or at least 5000 consecutive nucleotides of a target site in the genome of a corn plant.

[0145] Aspect B63: The method of Aspect B61 or B62, wherein the at least one homology arm is at least 70%, at least 75%, at least 80%, at least 85%, at least 90%, at least 95%, at least 96%, at least 97%, at least 99% or 100% complementary to at least 20, at least 25, at least 30, at least 35, at least 40, at least 45, at least 50, at least 60, at least 70, at least 80, at least 90, at least 100, at least 150, at least 200, at least 250, at least 500, at least 1000, at least 2500, or at least 5000 consecutive nucleotides of a target site in the genome of a corn plant.

[0146] Aspect B64: The method of any one of Aspects B58-B63, wherein the at least one cell of an explant is transformed using a site-specific nuclease.

[0147] Aspect B65: The method of Aspect B64, wherein the site-specific nuclease is a meganuclease, a zinc-finger nuclease (ZFN), a RNA-guided endonuclease, a TALE-endonuclease (TALEN), a recombinase, or a transposase.

[0148] Aspect B66: The method of Aspect B64, wherein the site-specific nuclease is an RNA-guided endo-nuclease.

[0149] Aspect B67: The method of Aspect B66, wherein the at least one cell of an explant is further trans-formed using a guide RNA (gRNA) molecule.

[0150] Aspect B68: The method of Aspect B67, wherein the RNA-guided endonuclease in association with the guide RNA molecule causes a double strand break or nick at or near the target DNA sequence of the guide RNA in the genome of the corn plant to direct the integration of the insertion sequence into the genome of the transgenic corn plant at or near the target DNA sequence of the guide RNA

[0151] Aspect B69: The method of Aspect B67 or B68, wherein the guide RNA molecule is a CRISPR RNA (crRNA) or a single-chain guide RNA (sgRNA).

[0152] Aspect B70: The method of any one of Aspects B67-B69, wherein the guide RNA comprises a sequence complementary to a protospacer adjacent motif (PAM) sequence present in the genome of the transgenic corn plant immediately adjacent to the target DNA sequence.

[0153] Aspect B71: The method of any one of Aspects B61-B70, wherein target site of the homology arm in the genome of a corn plant is at or near the target site or target DNA sequence of the site-specific nuclease and/or the guide RNA.

[0154] Aspect B72: The method of any one of Aspects B58-B71, further comprising: (c) selecting a transgenic corn plant comprising the recombinant DNA construct.

[0155] Aspect B73: The method of Aspect B72, wherein the selecting step (c) comprises determining if the recombinant DNA construct was transformed or integrated into the genome of the transgenic corn plant using a molecular assay.

[0156] Aspect B74: The method of Aspect B72, wherein the selecting step (c) comprises determining if the recombinant DNA construct was transformed or integrated into the genome of the transgenic corn plant by observing a plant phenotype.

[0157] Aspect B75: A recombinant DNA donor template comprising at least one homology arm and an insertion sequence, wherein the at least one homology arm is at least 70%, at least 75%, at least 80%, at least 85%, at least 90%, at least 95%, at least 96%, at least 97%, at least 99% or 100% complementary to at least 20, at least 25, at least 30, at least 35, at least 40, at least 45, at least 50, at least 60, at least 70, at least 80, at least 90, at least 100, at least 150, at least 200, at least 250, at least 500, at least 1000, at least 2500, or at least 5000 consecutive nucleotides of a target site in the genome of a corn plant, wherein the insertion sequence comprises a recombinant DNA construct comprising a transcribable DNA sequence encoding a GA2 oxidase mRNA and protein and a plant expressible promoter, and wherein the transcribable DNA sequence is operably linked to the plant-expressible promoter.

[0158] Aspect B76: The recombinant DNA donor template of Aspect B75, wherein the at least one homology arm comprises two homology arms including a first homology arm and a second homology arm, wherein the first homology arm comprises a sequence that is at least 70%, at least 75%, at least 80%, at least 85%, at least 90%, at least 95%, at least 96%, at least 97%, at least 99% or 100% complementary to at least 20, at least 25, at least 30, at least 35, at least 40, at least 45, at least 50, at least 60, at least 70, at least 80, at least 90, at least 100, at least 150, at least 200, at least 250, at least 500, at least 1000, at least 2500, or at least 5000 consecutive nucleotides of a first flanking DNA sequence, and the second homology arm comprises a sequence that is at least 70%, at least 75%, at least 80%, at least 85%, at least 90%, at least 95%, at least 96%, at least 97%, at least 99% or 100% complementary to at least 20, at least 25, at least 30, at least 35, at least 40, at least 45, at least 50, at least 60, at least 70, at least 80, at least 90, at least 100, at least 150, at least 200, at least 250, at least 500, at least 1000, at least 2500, or at least 5000 consecutive nucleotides of a second flanking DNA sequence, wherein the first flanking DNA sequence and the second flanking DNA se-quence are genomic sequences at or near the same genomic locus of a corn plant, and wherein the insertion sequence is located between the first homology arm and the second homology arm.

[0159] Aspect B77: A DNA molecule or vector comprising the recombinant DNA donor template of Aspect B75 or B76.

[0160] Aspect B78: The DNA molecule or vector of Aspect B77, further comprising a polynucleotide se-quence encoding a site-specific nuclease.

[0161] Aspect B79: The DNA molecule or vector of Aspect B77 or B78, further comprising a polynucleotide sequence encoding a guide RNA.

[0162] Aspect B80: A composition comprising the DNA molecule or vector and/or the recombinant DNA donor template of any one of Aspects B75-B79 and a guide RNA.

[0163] Aspect B81: A composition comprising the DNA molecule or vector and/or the recombinant DNA donor template of any one of Aspects B75-B79 and a site-specific nuclease.

[0164] Aspect B82: The composition of Aspect B81, further comprising a guide RNA.

[0165] Aspect B83: A composition comprising a first DNA molecule or vector and a second DNA molecule or vector, wherein the first DNA molecule or vector comprises the recombinant DNA donor template of Aspect B75 or B76 and the second DNA molecule or vector comprises a polynucleotide sequence encoding a site-specific nuclease.

[0166] Aspect B84: The composition of Aspect B83, wherein the first DNA molecule or vector or the second DNA molecule or vector comprises a polynucleotide sequence encoding a guide RNA.

[0167] Aspect B85: A composition comprising a first DNA molecule or vector and a second DNA molecule or vector, wherein the first DNA molecule or vector comprises the recombinant DNA donor template of Aspect B75 or B76 and the second DNA molecule or vector comprises a polynucleotide sequence encoding a guide RNA.

[0168] Aspect B86: A transgenic corn plant, plant part or plant cell comprising the insertion sequence of the recombinant DNA donor template of any one of Aspects B75-B79.

### BRIEF DESCRIPTION OF THE DRAWINGS

[0169] FIG. 1 shows a representative image of a transgenic corn plant at V9 stage that is homozygous for Event 2 for overexpression of GA2 oxidase_3 (GA2Ox3) transgene, next to a wild-type control plant.

[0170] FIG. 2 shows a bar graph of the average plant heights at V5 or V9 stage of inbred corn plants homozygous for multiple events of each transgene expressing either GA2 oxidase_3 (GA2Ox3) (Events 1-3), GA2 oxidase_9 (GA2Ox9) (Events 4-6), or GA2 oxidase_2 (GA2Ox2) (Events 7-9), relative to wild-type control plants.

[0171] FIG. 3 shows a bar graph of the average plant heights at V5 or V9 stage of inbred corn plants hemizygous for multiple events of each transgene expressing either GA2 oxidase_3 (GA2Ox3) (Event 1), GA2 oxidase_9 (GA2Ox9) (Events 4 and 6), or GA2 oxidase_2 (GA2Ox2) (Events 7 and 8), relative to wild-type control plants.

[0172] FIG. 4 shows a bar graph of the average plant heights at V5 or V9 stage of hybrid corn plants hemizygous for multiple events of the GA2 oxidase_2 (GA2Ox2) (Events 7-9), relative to wild-type control plants.

### DETAILED DESCRIPTION

### Definitions

[0173] To facilitate understanding of the disclosure, several terms and abbreviations as used herein are defined below as follows:

[0174] The term “and/or” when used in a list of two or more items, means that any one of the listed items can be employed by itself or in combination with any one or more of the listed items. For example, the expression “A and/or B” is intended to mean either or both of A and B —i.e., A alone, B alone, or A and B in combination. The expression “A, B and/or C” is intended to mean A alone, B alone, C alone, A and B in combination, A and C in combination, B and C in combination, or A, B, and C in combination.

[0175] The term “about” as used herein, is intended to qualify the numerical values that it modifies, denoting such a value as variable within a margin of error. When no particular margin of error, such as a standard deviation to a mean value, is recited, the term “about” should be understood to mean that range which would encompass the recited value and the range which would be included by rounding up or down to that figure, taking into account significant figures.

[0176] The term “cereal plant” as used herein refers a monocotyledonous (monocot) crop plant that is in the Poaceae or Gramineae family of grasses and is typically harvested for its seed, including, for example, wheat, corn, rice, millet, barley, Sorghum, oat and rye. As commonly understood, a “corn plant” or “maize plant” refers to any plant of species Zea mays and includes all plant varieties that can be bred with corn, including wild maize species.

[0177] The terms “percent identity” or “percent identical” as used herein in reference to two or more nucleotide or protein sequences is calculated by (i) comparing two optimally aligned sequences (nucleotide or protein) over a window of comparison, (ii) determining the number of positions at which the identical nucleic acid base (for nucleotide sequences) or amino acid residue (for proteins) occurs in both sequences to yield the number of matched positions, (iii) dividing the number of matched positions by the total number of positions in the window of comparison, and then (iv) multiplying this quotient by 100% to yield the percent identity. For purposes of calculating “percent identity” between DNA and RNA sequences, a uracil (U) of a RNA sequence is considered identical to a thymine (T) of a DNA sequence. If the window of comparison is defined as a region of alignment between two or more sequences (i.e., excluding nucleotides at the 5′ and 3′ ends of aligned polynucleotide sequences, or amino acids at the N-terminus and C-terminus of aligned protein sequences, that are not identical between the compared sequences), then the “percent identity” may also be referred to as a “percent alignment identity”. If the “percent identity” is being calculated in relation to a reference sequence without a particular comparison window being specified, then the percent identity is determined by dividing the number of matched positions over the region of alignment by the total length of the reference sequence. Accordingly, for purposes of the present disclosure, when two sequences (query and subject) are optimally aligned (with allowance for gaps in their alignment), the “percent identity” for the query sequence is equal to the number of identical positions between the two sequences divided by the total number of positions in the query sequence over its length (or a comparison window), which is then multiplied by 100%.

[0178] It is recognized that residue positions of proteins that are not identical often differ by conservative amino acid substitutions, where amino acid residues are substituted for other amino acid residues with similar size and chemical properties (e.g., charge, hydrophobicity, polarity, etc.), and therefore may not change the functional properties of the molecule. When sequences differ in conservative substitutions, the percent sequence similarity may be adjusted upwards to correct for the conservative nature of the non-identical substitution(s). Sequences that differ by such conservative substitutions are said to have “sequence similarity” or “similarity.” Thus, “percent similarity” or “percent similar” as used herein in reference to two or more protein sequences is calculated by (i) comparing two optimally aligned protein sequences over a window of comparison, (ii) determining the number of positions at which the same or similar amino acid residue occurs in both sequences to yield the number of matched positions, (iii) dividing the number of matched positions by the total number of positions in the window of comparison (or the total length of the reference or query protein if a window of comparison is not specified), and then (iv) multiplying this quotient by 100% to yield the percent similarity. Conservative amino acid substitutions for proteins are known in the art.

[0179] For optimal alignment of sequences to calculate their percent identity or similarity, various pair-wise or multiple sequence alignment algorithms and programs are known in the art, such as ClustalW, or Basic Local Alignment Search Tool® (BLAST®), etc., that may be used to compare the sequence identity or similarity between two or more nucleotide or protein sequences. Although other alignment and comparison methods are known in the art, the alignment between two sequences (including the percent identity ranges described above) may be as determined by the ClustalW or BLAST® algorithm, see, e.g., Chenna R. et al., “Multiple sequence alignment with the Clustal series of programs,” Nucleic Acids Research 31: 3497-3500 (2003); Thompson J D et al., “Clustal W: Improving the sensitivity of progressive multiple sequence alignment through sequence weighting, position-specific gap penalties and weight matrix choice,” Nucleic Acids Research 22: 4673-4680 (1994); and Larkin M A et al., “Clustal W and Clustal X version 2.0,” Bioinformatics 23: 2947-48 (2007); and Altschul, S. F., Gish, W., Miller, W., Myers, E. W. & Lipman, D. J. (1990) “Basic local alignment search tool.” J. Mol. Biol. 215:403-410 (1990), the entire contents and disclosures of which are incorporated herein by reference.

[0180] The terms “percent complementarity” or “percent complementary”, as used herein in reference to two nucleotide sequences, is similar to the concept of percent identity but refers to the percentage of nucleotides of a query sequence that optimally base-pair or hybridize to nucleotides of a subject sequence when the query and subject sequences are linearly arranged and optimally base paired without secondary folding structures, such as loops, stems or hairpins. Such a percent complementarity may be between two DNA strands, two RNA strands, or a DNA strand and a RNA strand. The “percent complementarity” is calculated by (i) optimally base-pairing or hybridizing the two nucleotide sequences in a linear and fully extended arrangement (i.e., without folding or secondary structures) over a window of comparison, (ii) determining the number of positions that base-pair between the two sequences over the window of comparison to yield the number of complementary positions, (iii) dividing the number of complementary positions by the total number of positions in the window of comparison, and (iv) multiplying this quotient by 100% to yield the percent complementarity of the two sequences. Optimal base pairing of two sequences may be determined based on the known pairings of nucleotide bases, such as G-C, A-T, and A-U, through hydrogen bonding. If the “percent complementarity” is being calculated in relation to a reference sequence without specifying a particular comparison window, then the percent identity is determined by dividing the number of complementary positions between the two linear sequences by the total length of the reference sequence. Thus, for purposes of the present disclosure, when two sequences (query and subject) are optimally base-paired (with allowance for mismatches or non-basepaired nucleotides but without folding or secondary structures), the “percent complementarity” for the query sequence is equal to the number of base-paired positions between the two sequences divided by the total number of positions in the query sequence over its length (or by the number of positions in the query sequence over a comparison window), which is then multiplied by 100%.

[0181] The term “operably linked” refers to a functional linkage between a promoter or other regulatory element and an associated transcribable DNA sequence or coding sequence of a gene (or transgene), such that the promoter, etc., operates or functions to initiate, assist, affect, cause, and/or promote the transcription and expression of the associated transcribable DNA sequence or coding sequence, at least in certain cell(s), tissue(s), developmental stage(s), and/or condition(s).

[0182] The term “plant-expressible promoter” refers to a promoter that can initiate, assist, affect, cause, and/or promote the transcription and expression of its associated transcribable DNA sequence, coding sequence or gene in a plant cell or tissue.

[0183] The term “heterologous” in reference to a promoter or other regulatory sequence in relation to an associated polynucleotide sequence (e.g., a transcribable DNA sequence or coding sequence or gene) is a promoter or regulatory sequence that is not operably linked to such associated polynucleotide sequence in nature—e.g., the promoter or regulatory sequence has a different origin relative to the associated polynucleotide sequence and/or the promoter or regulatory sequence is not naturally occurring in a plant species to be transformed with the promoter or regulatory sequence.

[0184] The term “recombinant” in reference to a polynucleotide (DNA or RNA) molecule, protein, construct, vector, etc., refers to a polynucleotide or protein molecule or sequence that is man-made and not normally found in nature, and/or is present in a context in which it is not normally found in nature, including a polynucleotide (DNA or RNA) molecule, protein, construct, etc., comprising a combination of two or more polynucleotide or protein sequences that would not naturally occur together in the same manner without human intervention, such as a polynucleotide molecule, protein, construct, etc., comprising at least two polynucleotide or protein sequences that are operably linked but heterologous with respect to each other. For example, the term “recombinant” can refer to any combination of two or more DNA or protein sequences in the same molecule (e.g., a plasmid, construct, vector, chromosome, protein, etc.) where such a combination is man-made and not normally found in nature. As used in this definition, the phrase “not normally found in nature” means not found in nature without human introduction. A recombinant polynucleotide or protein molecule, construct, etc., may comprise polynucleotide or protein sequence(s) that is/are (i) separated from other polynucleotide or protein sequence(s) that exist in proximity to each other in nature, and/or (ii) adjacent to (or contiguous with) other polynucleotide or protein sequence(s) that are not naturally in proximity with each other. Such a recombinant polynucleotide molecule, protein, construct, etc., may also refer to a polynucleotide or protein molecule or sequence that has been genetically engineered and/or constructed outside of a cell. For example, a recombinant DNA molecule may comprise any engineered or man-made plasmid, vector, etc., and may include a linear or circular DNA molecule. Such plasmids, vectors, etc., may contain various maintenance elements including a prokaryotic origin of replication and selectable marker, as well as one or more transgenes or expression cassettes perhaps in addition to a plant selectable marker gene, etc.

[0185] As used herein, the term “isolated” refers to at least partially separating a molecule from other molecules typically associated with it in its natural state. In one embodiment, the term “isolated” refers to a DNA molecule that is separated from the nucleic acids that normally flank the DNA molecule in its natural state. For example, a DNA molecule encoding a protein that is naturally present in a bacterium would be an isolated DNA molecule if it was not within the DNA of the bacterium from which the DNA molecule encoding the protein is naturally found. Thus, a DNA molecule fused to or operably linked to one or more other DNA molecule(s) with which it would not be associated in nature, for example as the result of recombinant DNA or plant transformation techniques, is considered isolated herein. Such molecules are considered isolated even when integrated into the chromosome of a host cell or present in a nucleic acid solution with other DNA molecules.

[0186] As used herein, an “encoding region” or “coding region” refers to a portion of a polynucleotide that encodes a functional unit or molecule (e.g., a mRNA and/or protein).

[0187] As used herein, “modified” in the context of a plant, plant seed, plant part, plant cell, and/or plant genome, refers to a plant, plant seed, plant part, plant cell, and/or plant genome comprising an engineered change in the expression level and/or coding sequence of one or more GA oxidase gene(s) relative to a wild-type or control plant, plant seed, plant part, plant cell, and/or plant genome, such as via a transgenic event comprising a coding or transcribable DNA sequence encoding one or more GA2 oxidase mRNA(s) and protein(s), which may be operably linked to a plant-expressible promoter. For clarity, therefore, a modified plant, plant seed, plant part, plant cell, and/or plant genome includes a transgenic plant, plant seed, plant part, plant cell, and/or plant genome having a modified or ectopic expression, expression level and/or expression pattern of one or more GA2 oxidase gene(s) or coding sequence(s) relative to a wild-type or control plant, plant seed, plant part, plant cell, and/or plant genome. Modified plants, plant parts, seeds, etc., may have been subjected to genetic transformation (e.g., without being limiting, via methods of Agrobacterium transformation or microprojectile bombardment), site-directed integration (e.g., without being limiting, via methods using site-specific nucleases), or a combination thereof. Such “modified” plants, plant seeds, plant parts, and plant cells include plants, plant seeds, plant parts, and plant cells that are offspring or derived from “modified” plants, plant seeds, plant parts, and plant cells that retain the molecular change (e.g., transgene) expressing one or more GA2 oxidase genes or coding sequences. A modified seed provided herein may give rise to a modified plant provided herein. A modified plant, plant seed, plant part, plant cell, or plant genome provided herein may comprise a recombinant DNA construct or vector as provided herein. A “modified plant product” may be any product made from a modified plant, plant part, plant cell, or plant chromosome provided herein, or any portion or component thereof.

[0188] As used herein, the term “control plant” (or likewise a “control” plant seed, plant part, plant cell and/or plant genome) refers to a plant (or plant seed, plant part, plant cell and/or plant genome) that is used for comparison to a modified plant (or modified plant seed, plant part, plant cell and/or plant genome) and has the same or similar genetic background (e.g., same parental lines, hybrid cross, inbred line, testers, etc.) as the modified plant (or plant seed, plant part, plant cell and/or plant genome), except for the transgene(s) of the modified plant encoding one or more GA2 oxidases. For example, a control plant may be an inbred line that is the same as the inbred line used to make the modified plant, or a control plant may be the product of the same hybrid cross of inbred parental lines as the modified plant, except for the absence in the control plant of any transgenic event(s) expressing one or more GA2 oxidase genes or coding sequences. For purposes of comparison to a modified plant, plant seed, plant part, plant cell and/or plant genome, a “wild-type plant” (or likewise a “wild-type” plant seed, plant part, plant cell and/or plant genome) refers to a non-transgenic and non-genome edited control plant, plant seed, plant part, plant cell and/or plant genome. As used herein, a “control” plant, plant seed, plant part, plant cell and/or plant genome may also be a plant, plant seed, plant part, plant cell and/or plant genome having a similar (but not the same or identical) genetic background to a modified plant, plant seed, plant part, plant cell and/or plant genome, if deemed sufficiently similar for comparison of the characteristics or traits to be analyzed.

[0189] As used herein, a “target site” for genome editing refers to the location of a polynucleotide sequence within a plant genome that is bound and cleaved by a site-specific nuclease introducing a double stranded break (or single-stranded nick) into the nucleic acid backbone of the polynucleotide sequence and/or its complementary DNA strand. A target site may comprise at least 10, at least 11, at least 12, at least 13, at least 14, at least 15, at least 16, at least 17, at least 18, at least 19, at least 20, at least 21, at least 22, at least 23, at least 24, at least 25, at least 26, at least 27, at least 29, or at least 30 consecutive nucleotides. A “target site” for a RNA-guided nuclease may comprise the sequence of either complementary strand of a double-stranded nucleic acid (DNA) molecule or chromosome at the target site. A site-specific nuclease may bind to a target site, such as via a non-coding guide RNA (e.g., without being limiting, a CRISPR RNA (crRNA) or a single-guide RNA (sgRNA) as described further below). A noncoding guide RNA provided herein may be complementary to a target site (e.g., complementary to either strand of a double-stranded nucleic acid molecule or chromosome at the target site). It will be appreciated that perfect identity or complementarity may not be required for a noncoding guide RNA to bind or hybridize to a target site. For example, at least 1, at least 2, at least 3, at least 4, at least 5, at least 6, at least 7, or at least 8 mismatches (or more) between a target site and a non-coding RNA may be tolerated. A “target site” also refers to the location of a polynucleotide sequence within a plant genome that is bound and cleaved by another site-specific nuclease that may not be guided by a non-coding RNA molecule, such as a meganuclease, zinc finger nuclease (ZFN), or a transcription activator-like effector nuclease (TALEN), to introduce a double stranded break (or single-stranded nick) into the polynucleotide sequence and/or its complementary DNA strand. As used herein, a “target region” or a “targeted region” refers to a polynucleotide sequence or region that is flanked by two or more target sites. Without being limiting, in some embodiments a target region may be subjected to a mutation, deletion, insertion or inversion. As used herein, “flanked” when used to describe a target region of a polynucleotide sequence or molecule, refers to two or more target sites of the polynucleotide sequence or molecule surrounding the target region, with one target site on each side of the target region.

[0190] As used herein, a “donor molecule”, “donor template”, or “donor template molecule” (collectively a “donor template”), which may be a recombinant DNA donor template, is defined as a nucleic acid molecule having a nucleic acid template or insertion sequence for site-directed, targeted insertion or recombination into the genome of a plant cell via repair of a nick or double-stranded DNA break in the genome of a plant cell. For example, a “donor template” may be used for site-directed integration of a transgene or construct into a target site within the genome of a plant. A targeted genome editing technique provided herein may comprise the use of one or more, two or more, three or more, four or more, or five or more donor molecules or templates. A “donor template” may be a single-stranded or double-stranded DNA or RNA molecule or plasmid. An “insertion sequence” of a donor template is a sequence designed for targeted insertion into the genome of a plant cell, which may be of any suitable length, such as to include a construct and/or coding or transcribable DNA sequence encoding one or more GA2 oxidase(s). A donor template may also have at least one homology sequence or homology arm, such as two homology arms, to direct the integration of a mutation or insertion sequence into a target site within the genome of a plant via homologous recombination, wherein the homology sequence or homology arm(s) are identical or complementary, or have a percent identity or percent complementarity, to a sequence at or near the target site within the genome of the plant. When a donor template comprises homology arm(s) and an insertion sequence, the homology arm(s) will flank or surround the insertion sequence of the donor template.

[0191] An insertion sequence of a donor template may comprise one or more genes or sequences that each encode a transcribed mRNA sequence and/or a translated protein sequence. A transcribed sequence or gene of a donor template may encode a mRNA and protein of a GA2 oxidase gene. The donor template may be linear or circular and may be single-stranded or double-stranded. A donor template may be delivered to the cell as a naked nucleic acid (e.g., via particle bombardment), as a complex with one or more delivery agents (e.g., liposomes, proteins, poloxamers, T-strand encapsulated with proteins, etc.), or contained in a bacterial or viral delivery vehicle, such as, for example, Agrobacterium tumefaciens or a geminivirus, respectively. An insertion sequence of a donor template provided herein may comprise a coding or transcribable DNA sequence(s) that may be transcribed into a mRNA molecule(s), which may encode a GA2 oxidase protein(s).

[0192] A donor template provided herein may comprise at least one, at least two, at least three, at least four, at least five, at least six, at least seven, at least eight, at least nine, or at least ten transgenes and/or coding or transcribable DNA sequences. Without being limiting, a gene or transcribable DNA sequence of a donor template may also include, for example, an insecticidal resistance gene, an herbicide tolerance gene, a nitrogen use efficiency gene, a water use efficiency gene, a nutritional quality gene, a yield improvement gene, a disease resistance gene, a DNA binding gene, a selectable marker gene, an RNAi or suppression construct, a site-specific genome modification enzyme gene, a single guide RNA of a CRISPR/Cas9 system, a geminivirus-based expression cassette, or a plant viral expression vector system. A donor template may comprise a promoter, such as a tissue-specific or tissue-preferred promoter, a constitutive promoter, or an inducible promoter. A donor template may comprise a leader, enhancer, promoter, transcriptional start site, 5′-UTR, one or more exon(s), one or more intron(s), transcriptional termination site, region or sequence, 3′-UTR, and/or polyadenylation signal. The leader, enhancer, and/or promoter may be operably linked to a coding or transcribable DNA sequence encoding a GA2 oxidase mRNA and/or protein.

[0193] As used herein, a “vascular promoter” refers to a plant-expressible promoter that drives, causes or initiates expression of a transcribable DNA sequence or transgene operably linked to such promoter in one or more vascular tissue(s) of the plant, even if the promoter is also expressed in other non-vascular plant cell(s) or tissue(s). Such vascular tissue(s) may comprise one or more of the phloem, vascular parenchymal, and/or bundle sheath cell(s) or tissue(s) of the plant. A “vascular promoter” is distinguished from a constitutive promoter in that it has a regulated and relatively more limited pattern of expression that includes one or more vascular tissue(s) of the plant. A vascular promoter includes both vascular-specific promoters and vascular-preferred promoters.

[0194] As used herein, a “leaf promoter” refers to a plant-expressible promoter that drives, causes or initiates expression of a transcribable DNA sequence or transgene operably linked to such promoter in one or more leaf tissue(s) of the plant, even if the promoter is also expressed in other non-leaf plant cell(s) or tissue(s). A leaf promoter includes both leaf-specific promoters and leaf-preferred promoters. A “leaf promoter” is distinguished from a vascular promoter in that it is expressed more predominantly or exclusively in leaf tissue(s) of the plant relative to other plant tissues, whereas a vascular promoter is expressed in vascular tissue(s) more generally including vascular tissue(s) outside of the leaf, such as the vascular tissue(s) of the stem, or stem and leaves, of the plant.

[0195] As used herein, a “plant-expressible promoter” refers to a promoter that drives, causes or initiates expression of a transcribable DNA sequence or transgene operably linked to such promoter in one or more plant cells or tissues, such as one or more cells or tissues of a corn plant.

### DESCRIPTION

[0196] Most grain producing grasses, such as wheat, rice and Sorghum, produce both male and female structures within each floret of the panicle (i.e., they have a single reproductive structure). However, corn or maize is unique among the grain-producing grasses in that it forms separate male (tassel) and female (ear) inflorescences. Corn produces completely sexually dimorphic reproductive structures by selective abortion of male organs (anthers) in florets of the ear, and female organs (ovules) in the florets of the tassel within early stages of development. Precisely regulated gibberellin synthesis and signaling is critical to regulation of this selective abortion process, with the female reproductive ear being most sensitive to disruptions in the GA pathway. Indeed, the “anther ear” phenotype is the most common reproductive phenotype in GA corn mutants.

[0197] In contrast to corn, mutations in the gibberellin synthesis or signaling pathways that led to the “Green Revolution” in wheat, rice and Sorghum had little impact on their reproductive structures because these crop species do not undergo the selective abortion process of the grain bearing panicle during development, and thus are not sensitive to disruptions in GA levels. The same mutations have not historically been utilized in corn because disruption of the GA synthesis and signaling pathway has repeatedly led to dramatic distortion and masculinization of the ear (“anther ear”) and sterility (disrupted anther and microspore development) in the tassel, in addition to extreme dwarfing in some cases. See, e.g., Chen, Y. et al., “The Maize DWARF1 Encodes a Gibberellin 3-Oxidase and Is Dual Localized to the Nucleus and Cytosol,” Plant Physiology 166: 2028-2039 (2014). These earlier GA mutant phenotypes (off-types) in corn led to significant reductions in kernel production and a reduction in yield. Furthermore, production of anthers within the ear increases the likelihood of fungal or insect infections, which reduces the quality of the grain that is produced on those mutant ears. Forward breeding to develop semi-dwarf lines of corn has not been successful, and the reproductive off-types (as well as the extreme dwarfing) of GA mutants have been challenging to overcome.

[0198] Despite these prior difficulties in achieving higher grain yields in corn through manipulation of the GA pathway, the present disclosure provides a way to manipulate GA levels in corn plants in a manner that reduces overall plant height and stem internode length and increases resistance to lodging, without causing the reproductive off-types previously associated with mutations of the GA pathway in corn. These short stature or semi-dwarf corn plants may also have one or more additional traits, such as increased stem diameter, reduced green snap, deeper roots, increased leaf area, earlier canopy closure, higher stomatal conductance, lower ear height, increased foliar water content, improved drought tolerance, increased nitrogen use efficiency, increased water use efficiency, reduced anthocyanin content and area in leaves under normal or nitrogen or water limiting stress conditions, increased yield, increased harvest index, increased ear weight, increased kernel number, and/or increased kernel weight.

[0199] Without being bound by theory, it is proposed that ectopic expression or overexpression of GA2 oxidase transgene(s) may be effective in achieving a short stature, semi-dwarf phenotype with increased resistance to lodging, but without reproductive off-types in the ear. It is further proposed, without being limited by theory, that restricting the expression of GA2 oxidase gene(s) to certain active GA-producing tissues, such as the vascular and/or leaf tissues of the plant, may be sufficient to produce a short-stature plant with increased lodging resistance, but without significant off-types in reproductive tissues. Expression of a GA2 oxidase transgene in a tissue-specific or tissue-preferred manner may be sufficient and effective at producing plants with the short stature phenotype, while avoiding potential off-types in reproductive tissues that were previously observed with GA mutants in corn (e.g., by avoiding or limiting the expression of the GA2 oxidase gene(s) in those reproductive tissues). For example, the GA2 oxidase transgene(s) may be expressed using a vascular promoter, such as a rice tungro bacilliform virus (RTBV) promoter, that drives expression in vascular tissues of plants. The expression pattern of the RTBV promoter is enriched in vascular tissues of corn plants relative to non-vascular tissues, which is sufficient to produce a semi-dwarf phenotype in corn plants when operably linked to a transcribable DNA sequence encoding a GA2 oxidase gene(s). Lowering of active GA levels in tissue(s) of a corn plant that produce active GAs may reduce plant height and increase lodging resistance, and off-types may be avoided in those plants if active GA levels are not also significantly impacted or lowered in reproductive tissues, such as the developing female organ or ear of the plant. If active GA levels could be reduced in the stalk, stem, or internode(s) of corn plants without significantly affecting GA levels in reproductive tissues (e.g., the female or male reproductive organs or inflorescences), then corn plants having reduced plant height and increased lodging resistance could be created without off-types in the reproductive tissues of the plant.

[0200] Thus, recombinant DNA constructs and transgenic plants are provided herein comprising a transcribable DNA sequence encoding a GA2 oxidase mRNA and protein operably linked to a plant expressible promoter, which may be a tissue-specific or tissue-preferred promoter. Such a tissue-specific or tissue-preferred promoter may drive expression of its associated GA2 oxidase coding sequence in one or more active GA-producing tissue(s) of the plant to reduce the level of active GAs produced in those tissue(s). Such a tissue-specific or tissue-preferred promoter may drive expression of its associated GA2 oxidase transgene or coding sequence during one or more vegetative stage(s) of development. Such a tissue-specific or tissue-preferred promoter may also have little or no expression in one or more cell(s) or tissue(s) of the developing female organ or ear of the plant to avoid the possibility of off-types in those reproductive tissues. According to some embodiments, the tissue-specific or tissue-preferred promoter is a vascular promoter, such as the RTBV promoter. The sequence of the RTBV promoter is provided herein as SEQ ID NO: 333, and a truncated version of the RTBV promoter is further provided herein as SEQ ID NO: 334.

[0201] Active or bioactive gibberellic acids (i.e., “active gibberellins” or “active GAs”) are known in the art for a given plant species, as distinguished from inactive GAs. For example, active GAs in corn and higher plants include the following: GA1, GA3, GA4, and GA7. Thus, an “active GA-producing tissue” is a plant tissue that produces one or more active GAs.

[0202] In addition to suppressing GA20 oxidase genes in active GA-producing tissues of the plant with a vascular tissue promoter, it is further proposed that GA2 oxidase transgenes may also be expressed with various constitutive promoters to cause the short, semi-dwarf stature phenotypes in corn, without any visible off-types in the ear. Thus, it is further proposed that expression of one or more GA2 oxidase transgenes could be carried out using a constitutive promoter to create a short stature, lodging-resistant corn plant without any significant or observable reproductive off-types in the plant.

[0203] Without being limited by theory, it is proposed that short stature, semi-dwarf phenotypes in corn plants may result from a sufficient level of expression of a GA2 oxidase transgene(s) in active GA-producing tissue(s) of the plant, and restricting the pattern of expression to avoid reproductive ear tissues may not be necessary to avoid reproductive off-types in the developing ear. It is proposed that the semi-dwarf phenotype with GA2 oxidase overexpression can be the result of shortening the stem internodes of the plant. Without being bound by theory, it is proposed that expression of GA2 oxidase transgene(s) in tissue(s) and/or cell(s) of the plant where active GAs are produced, and not necessarily in stem or internode tissue(s), may be sufficient to produce semi-dwarf plants, even though the short stature trait is due to shortening of the stem internodes. Given that GAs can migrate through the vasculature of the plant, it is proposed that manipulating GA oxidase genes in plant tissue(s) where active GAs are produced may result in a short stature, semi-dwarf plant, even though this may be largely achieved by reducing the level of active GAs produced in non-stem tissues (i.e., away from the site of action in the stem where reduced internode elongation leads to the semi-dwarf phenotype). However, without being bound by theory, expression of a GA2 oxidase transgene at low levels, and/or in a limited number of plant tissues, may be insufficient to cause a significant short stature, semi-dwarf phenotype.

[0204] According to embodiments of the present disclosure, modified corn plants are provided that have at least one beneficial agronomic trait and at least one female reproductive organ or ear that is substantially or completely free of off-types. The beneficial agronomic trait may include, for example, shorter plant height, shorter internode length in one or more internode(s), larger (thicker) stem or stalk diameter, increased lodging resistance, improved drought tolerance, increased nitrogen use efficiency, increased water use efficiency, deeper roots, larger leaf area, earlier canopy closure, and/or increased harvestable yield. Off-types may include male (tassel or anther) sterility, reduced kernel or seed number, and/or the presence of one or more masculinized or male (or male-like) reproductive structures in the female organ or ear (e.g., anther ear) of the plant. A modified corn plant is provided herein that lacks significant off-types in the reproductive tissues of the plant. Such a modified corn plant may have a female reproductive organ or ear that appears normal relative to a control or wild-type plant. Indeed, modified corn plants are provided that comprise at least one reproductive organ or ear that does not have or exhibit, or is substantially or completely free of, off-types including male sterility, reduced kernel or seed number, and/or masculinized structure(s) in one or more female organs or ears. As used herein, a female organ or ear of a plant, such as corn, is “substantially free” of male reproductive structures if male reproductive structures are absent or nearly absent in the female organ or ear of the plant based on visual inspection of the female organ or ear at later reproductive stages. A female organ or ear of a plant, such as corn, is “completely free” of mature male reproductive structures if male reproductive structures are absent or not observed or observable in the female organ or ear of the plant, such as a corn plant, by visual inspection of the female organ or ear at later reproductive stages. A female organ or ear of a plant, such as corn, without significant off-types and substantially free of male reproductive structures in the ear may have a number of kernels or seeds per female organ or ear of the plant that is at least 90%, at least 95%, at least 96%, at least 97%, at least 98%, at least 99%, at least 99.5%, at least 99.6%, at least 99.7%, at least 99.8%, or at least 99.9% of the number of kernels or seeds per female organ or ear of a wild-type or control plant. Likewise, a female organ or ear of a plant, such as corn, without significant off-types and substantially free of male reproductive structures in the ear may have an average kernel or seed weight per female organ or ear of the plant that is at least 90%, at least 95%, at least 96%, at least 97%, at least 98%, at least 99%, at least 99.5%, at least 99.6%, at least 99.7%, at least 99.8%, or at least 99.9% of the average kernel or seed weight per female organ or ear of a wild-type or control plant. A female organ or ear of a plant, such as corn, that is completely free of mature male reproductive structures may have a number of kernels or seeds per female organ or ear of the plant that is about the same as a wild-type or control plant. In other words, the reproductive development of the female organ or ear of the plant may be normal or substantially normal. However, the number of seeds or kernels per female organ or ear may depend on other factors that affect resource utilization and development of the plant. Indeed, the number of kernels or seeds per female organ or ear of the plant, and/or the kernel or seed weight per female organ or ear of the plant, may be about the same or greater than a wild-type or control plant.

[0205] The plant hormone gibberellin plays an important role in a number of plant developmental processes including germination, cell elongation, flowering, embryogenesis and seed development. Certain biosynthetic enzymes (e.g., GA20 oxidase and GA3 oxidase) and catabolic enzymes (e.g., GA2 oxidase) in the GA pathway are critical to affecting active GA levels in plant tissues. While the biosynthetic enzymes can increase the level of active GAs, the catabolic enzymes can reduce the level(s) of active GAs in plants or plant cells. Thus, it is proposed that overexpression or ectopic expression of a GA2 oxidase transgene in a constitutive or tissue-specific or tissue-preferred manner may produce corn plants having a short stature phenotype and increased lodging resistance, with possible increased yield, but without off-types in the ear. Thus, according to some embodiments, constructs and transgenes are provided comprising a transcribable DNA sequence encoding a GA2 oxidase protein operably linked to a constitutive or tissue-specific or tissue-preferred promoter, such as a vascular or leaf promoter. According to some embodiments, the tissue-specific or tissue-preferred promoter is a vascular promoter, such as the RTBV promoter. However, other types of tissue-specific or tissue preferred promoters may potentially be used for GA2 oxidase expression in active GA-producing tissues of a corn plant to produce a semi-dwarf phenotype without significant off-types.

[0206] According to some embodiments, a modified or transgenic plant is provided having a GA2 oxidase gene expression level that is increased in at least one plant tissue by at least 5%, at least 10%, at least 20%, at least 25%, at least 30%, at least 40%, at least 50%, at least 60%, at least 70%, at least 75%, at least 80%, at least 90%, or 100%, as compared to a control plant. According to some embodiments, a modified or transgenic plant is provided having a GA2 oxidase gene expression level that is increased in at least one plant tissue by 5%-20%, 5%25%, 5%-30%, 5%-40%, 5%-50%, 5%-60%, 5%-70%, 5%-75%, 5%-80%, 5%-90%, 5%100%, 75%-100%, 50%-100%, 50%-90%, 50%-75%, 25%-75%, 30%-80%, or 10%-75%, as compared to a control plant. According to these embodiments, the at least one tissue of a modified or transgenic plant having an increased expression level of a GA2 oxidase gene(s) includes one or more active GA producing tissue(s) of the plant, such as the vascular and/or leaf tissue(s) of the plant, during one or more vegetative stage(s) of development.

[0207] As understood in the art, the term “promoter” may generally refer to a DNA sequence that contains an RNA polymerase binding site, transcription start site, and/or TATA box and assists or promotes the transcription and expression of an associated transcribable polynucleotide sequence and/or gene (or transgene). A promoter may be synthetic or artificial and/or engineered, varied or derived from a known or naturally occurring promoter sequence. A promoter may be a chimeric promoter comprising a combination of two or more heterologous sequences. A promoter of the present invention may thus include variants of promoter sequences that are similar in composition, but not identical to, other promoter sequence(s) known or provided herein. A promoter may be classified according to a variety of criteria relating to the pattern of expression of an associated coding or transcribable sequence or gene (including a transgene) operably linked to the promoter, such as constitutive, developmental, tissue-specific, inducible, etc. Promoters that drive expression in all or nearly all tissues of the plant are referred to as “constitutive” promoters. However, the expression level with a “constitutive promoter” is not necessarily uniform across different tissue types and cells. Promoters that drive expression during certain periods or stages of development are referred to as “developmental” promoters. Promoters that drive enhanced expression in certain tissues of the plant relative to other plant tissues are referred to as “tissue-enhanced” or “tissue-preferred” promoters. Thus, a “tissue-preferred” promoter causes relatively higher or preferential or predominant expression in a specific tissue(s) of the plant, but with lower levels of expression in other tissue(s) of the plant. Promoters that express within a specific tissue(s) of the plant, with little or no expression in other plant tissues, are referred to as “tissue-specific” promoters. A tissue-specific or tissue-preferred promoter may also be defined in terms of the specific or preferred tissue(s) in which it drives expression of its associated transcribable DNA sequence or suppression element. For example, a promoter that causes specific expression in vascular tissues may be referred to as a “vascular-specific promoter”, whereas a promoter that causes preferential or predominant expression in vascular tissues may be referred to as a “vascular-preferred promoter”. Likewise, a promoter that causes specific expression in leaf tissues may be referred to as a “leaf-specific promoter”, whereas a promoter that causes preferential or predominant expression in leaf tissues may be referred to as a “leaf-preferred promoter”. An “inducible” promoter is a promoter that initiates transcription in response to an environmental stimulus such as cold, drought or light, or other stimuli, such as wounding or chemical application. A promoter may also be classified in terms of its origin, such as being heterologous, homologous, chimeric, synthetic, etc. A “heterologous” promoter is a promoter sequence having a different origin relative to its associated transcribable sequence, coding sequence, or gene (or transgene), and/or not naturally occurring in the plant species to be transformed, as defined above.

[0208] In some embodiments, transgenic expression of a GA2 oxidase transgene is constitutive or tissue-specific (e.g., only in leaf and/or vascular tissue). For example, expression of a GA2 oxidase transgene may be vascular or leaf tissue specific or preferred. In other embodiments, expression of a GA2 oxidase transgene is constitutive and not tissue-specific. According to some embodiments, expression of a GA2 oxidase transgene is increased in one or more tissue types (e.g., in leaf and/or vascular tissue(s)) of a modified or transgenic plant as compared to the same tissue(s) of a control plant.

[0209] According to embodiments of the present disclosure, a recombinant DNA molecule, construct or vector is provided comprising an expression cassette comprising a GA2 oxidase coding sequence or transcribable DNA sequence that is operably linked to a plant-expressible constitutive or tissue-specific or tissue-preferred promoter. The expression cassette may comprise a transcribable DNA sequence having a percent identity to all or part of a GA2 oxidase gene or coding sequence. A transgene having a coding sequence with a lower percent identity to all or part of a GA2 oxidase gene may encode a protein having or retaining a GA catabolic activity in a corn plant or plant cell similar to GA2 oxidase genes in general.

[0210] A single GA2 oxidase transgene or expression cassette may be present in a construct, molecule or vector, or multiple GA2 oxidase transgenes or expression cassettes may be arranged serially in tandem or arranged in tandem segments or repeats, in a construct, molecule or vector, which may also be interrupted by one or more spacer sequence(s). The sequence of each transgene or expression cassette may encode a GA2 oxidase mRNA and protein. A transcribable DNA sequence or coding sequence of a GA2 oxidase transgene may encode a protein having at least 70%, at least 75%, at least 80%, at least 85%, at least 90%, at least 95%, at least 96%, at least 97%, at least 98%, at least 99%, at least 99.5% or 100% identity to all or part of a GA2 oxidase gene sequence.

[0211] According to embodiments of the present disclosure, a recombinant DNA molecule, construct or vector is provided comprising a transcribable DNA sequence encoding a GA2 oxidase. According to some embodiments, a recombinant DNA molecule, vector or construct is provided comprising a transcribable DNA sequence encoding a GA2 oxidase mRNA and protein in a plant cell, and wherein the transcribable DNA sequence is operably linked to a plant-expressible promoter, such as a constitutive or tissue-specific or tissue-preferred promoter. According to embodiments of the present disclosure, suitable tissue-specific or tissue preferred promoters for expression of a GA2 oxidase may include those promoters that drive or cause expression of its associated suppression element or sequence at least in the vascular and/or leaf tissue(s) of a corn plant. Expression of the GA2 oxidase with a tissue-specific or tissue-preferred promoter may also occur in other tissues of the corn plant outside of the vascular and leaf tissues, but active GA levels in the developing reproductive tissues of the plant (particularly in the female reproductive organ or ear) are preferably not significantly reduced or impacted (relative to wild type or control plants), such that development of the female organ or ear may proceed normally in the transgenic plant without off-types in the ear and a loss in yield potential. According to many embodiments, the plant-expressible promoter may preferably drive expression constitutively or in at least a portion of the vascular and/or leaf tissues of the plant. However, some tissue-specific and tissue-preferred promoters driving expression of a GA2 oxidase transgene in a plant may not produce a significant short stature or anti-lodging phenotypes due to the spatial-temporal pattern of expression of the promoter during plant development, and/or the amount or strength of expression of the promoter being too low or weak. A sufficient level of expression of a transcribable DNA sequence encoding a GA2 oxidase may be necessary to produce a short stature, semi-dwarf phenotype that resists lodging, since lower levels of expression may be insufficient to lower active GA levels in the plant to a sufficient extent to cause a significant phenotype. Thus, tissue-specific and tissue-preferred promoters that drive, etc., a moderate or strong level of expression of their associated transcribable DNA sequence in active GA-producing tissue(s) of a plant may be preferred. Furthermore, such tissue-specific and tissue-preferred should drive, etc., expression of their associated transcribable DNA sequence during one or more vegetative stage(s) of plant development when the plant is growing and/or elongating including one or more of the following vegetative stage(s): V_{E}, V1, V2, V3, V4, V5, V6, V7, V8, V9, V10, V11, V12, V13, V14, Vn, V_{T}, such as expression at least during V3-V12, V4-V12, V5-V12, V6-V12, V7-V12, V8-V12, V3-V14, V5-V14, V6-V14, V7-V14, V8-V14, V9-V14, V10-V14, etc., or during any other range of vegetative stages when growth and/or elongation of the plant is occurring.

[0212] Any vascular promoters known in the art may potentially be used as the tissue-specific or tissue-preferred promoter. Examples of vascular promoters include the RTBV promoter (see, e.g., SEQ ID NO: 333), a known sucrose synthase gene promoter, such as a corn sucrose synthase-1 (Sus1 or Sh1) promoter (see, e.g., SEQ ID NO: 335), a corn Sh1 gene paralog promoter, a barley sucrose synthase promoter (Ss1) promoter, a rice sucrose synthase-1 (RSs1) promoter (see, e.g., SEQ ID NO: 336), or a rice sucrose synthase-2 (RSs2) promoter (see, e.g., SEQ ID NO: 337), a known sucrose transporter gene promoter, such as a rice sucrose transporter promoter (SUT1) (see, e.g., SEQ ID NO: 338), or various known viral promoters, such as a Commelina yellow mottle virus (CoYMV) promoter, a wheat dwarf geminivirus (WDV) large intergenic region (LIR) promoter, a maize streak geminivirus (MSV) coat protein (CP) promoter, or a rice yellow stripe 1 (YS1)-like or OsYSL2 promoter (SEQ ID NO: 339), and any functional sequence portion or truncation of any of the foregoing promoters with a similar pattern of expression, such as a truncated RTBV promoter (see, e.g., SEQ ID NO: 334). Any other vascular promoters known in the art may also be used, including promoter sequences from related genes (e.g., sucrose synthase, sucrose transporter, and viral gene promoter sequences) from the same or different plant species, microbe or virus that have a similar pattern of expression. Further provided are promoter sequences with a high degree of homology to any of the foregoing. For example, a vascular promoter may comprise a DNA sequence that is at least at least 70%, at least 80%, at least 85%, at least 90%, at least 95%, at least 96%, at least 97%, at least 98%, at least 99%, at least 99.5% or 100% identical to one or more of SEQ ID NOs: 333, 334, 335, 336, 337, 338, and 339, any functional sequence portion or truncation thereof, and/or any sequence complementary to any of the foregoing sequences. Examples of vascular promoters may further include other known, engineered and/or later-identified promoter sequences shown to have a pattern of expression in vascular tissue(s) of a corn plant.

[0213] Any leaf promoters known in the art may potentially be used as the tissue-specific or tissue-preferred promoter. Examples of leaf promoters include a corn pyruvate phosphate dikinase or PPDK promoter (see, e.g., SEQ ID NO: 340), a corn fructose 1,6 bisphosphate aldolase or FDA promoter (see, e.g., SEQ ID NO: 341), and a rice Nadh-Gogat promoter (see, e.g., SEQ ID NO: 342), and any functional sequence portion or truncation of any of the foregoing promoters with a similar pattern of expression. Other examples of leaf promoters from monocot plant genes include a ribulose biphosphate carboxylase (RuBisCO) or RuBisCO small subunit (RBCS) promoter, a chlorophyll a/b binding protein gene promoter, a phosphoenolpyruvate carboxylase (PEPC) promoter, and a Myb gene promoter, and any functional sequence portion or truncation of any of these promoters with a similar pattern of expression. Any other leaf promoters known in the art may also be used, including promoter sequences from related genes from the same or different plant species, microbe or virus that have a similar pattern of expression. Further provided are promoter sequences with a high degree of homology to any of the foregoing. For example, a leaf promoter may comprise a DNA sequence that is at least at least 70%, at least 80%, at least 85%, at least 90%, at least 95%, at least 96%, at least 97%, at least 98%, at least 99%, at least 99.5% or 100% identical to one or more of SEQ ID NOs: 340, 341, and 342, any functional sequence portion or truncation thereof, and/or any sequence complementary to any of the foregoing sequences. Examples of leaf promoters may further include other known, engineered and/or later-identified promoter sequences shown to have a pattern of expression in leaf tissue(s) of a corn plant.

[0214] Any constitutive promoters known in the art may potentially be used. Examples of constitutive promoters that may be used in corn plants include, for example, various actin gene promoters, such as a rice Actin 1 promoter (see, e.g., U.S. Pat. No. 5,641,876; see also SEQ ID NO: 343 or SEQ ID NO: 344) and a rice Actin 2 promoter (see, e.g., U.S. Pat. No. 6,429,357; see also, e.g., SEQ ID NO: 345 or SEQ ID NO: 346), a CaMV 35S or 19S promoter (see, e.g., U.S. Pat. No. 5,352,605; see also, e.g., SEQ ID NO: 347 for CaMV 35S), a maize ubiquitin promoter (see, e.g., U.S. Pat. No. 5,510,474), a Coix lacryma-jobi polyubiquitin promoter (see, e.g., SEQ ID NO: 348), a rice or maize Gos2 promoter (see, e.g., Pater et al., The Plant Journal, 2(6): 837-44 1992; see also, e.g., SEQ ID NO: 349 for the rice Gos2 promoter), a FMV 35S promoter (see, e.g., U.S. Pat. No. 6,372,211), a dual enhanced CMV promoter (see, e.g., U.S. Pat. No. 5,322,938), a MMV promoter (see, e.g., U.S. Pat. No. 6,420,547; see also, e.g., SEQ ID NO: 350), a PCLSV promoter (see, e.g., U.S. Pat. No. 5,850,019; see also, e.g., SEQ ID NO: 351), an Emu promoter (see, e.g., Last et al., Theor. Appl. Genet. 81:581 (1991); and Mcelroy et al., Mol. Gen. Genet. 231:150 (1991)), a tubulin promoter from maize, rice or other species, a nopaline synthase (nos) promoter, an octopine synthase (ocs) promoter, a mannopine synthase (mas) promoter, or a plant alcohol dehydrogenase (e.g., maize Adh1) promoter, any other promoters including viral promoters known or later-identified in the art to provide constitutive expression in a corn plant, any other constitutive promoters known in the art that may be used in corn plants, and any functional sequence portion or truncation of any of the foregoing promoters.

[0215] Any other constitutive promoters known in the art may also be used, including promoter sequences from related genes from the same or different plant species, microbe or virus that have a similar pattern of expression. Further provided are promoter sequences with a high degree of homology to any of the foregoing. For example, a constitutive promoter may comprise a DNA sequence that is at least at least 70%, at least 80%, at least 85%, at least 90%, at least 95%, at least 96%, at least 97%, at least 98%, at least 99%, at least 99.5% or 100% identical to one or more of SEQ ID NOs: 343, 344, 345, 346, 347, 348, 349, 350, and 351, any functional sequence portion or truncation thereof, and/or any sequence complementary to any of the foregoing sequences. Examples of constitutive promoters may further include other known, engineered and/or later-identified promoter sequences shown to have a constitutive pattern of expression in a corn plant. Furthermore, any known or later-identified constitutive promoter may also be used.

[0216] According to embodiments of the present disclosure, a recombinant DNA molecule, construct or vector is provided comprising a transcribable DNA sequence encoding a GA2 oxidase protein from a monocot or cereal plant, such as a corn plant, or encoding a GA2 oxidase protein having at least a certain percent homology to a GA2 oxidase protein from a monocot or cereal plant, such as a corn plant. A family of at least thirteen GA2 oxidase genes have been identified in corn (Zea mays) including Zm.GA2 oxidase_1, Zm.GA2 oxidase_2, Zm.GA2 oxidase_3, Zm.GA2 oxidase_4, Zm.GA2 oxidase_5, Zm.GA2 oxidase_6, Zm.GA2 oxidase_7, Zm.GA2 oxidase_8, Zm.GA2 oxidase_9, Zm.GA2 oxidase_10, Zm.GA2 oxidase_11, Zm.GA2 oxidase_12, and Zm.GA2 oxidase_13. The DNA and protein sequences by SEQ ID NO for each of these GA2 oxidase genes are provided in Table 1.

TABLE 1
DNA and protein sequences for GA2 oxidase genes in corn.

| | Coding Sequence | |
|---|---|---|
| GA2 oxidase Gene | (CDS) | Protein |
| Zm.GA2 oxidase_1 | SEQ ID NO: 1 | SEQ ID NO: 2 |
| Zm.GA2 oxidase_2 | SEQ ID NO: 3 | SEQ ID NO: 4 |
| Zm.GA2 oxidase_3 | SEQ ID NO: 5 | SEQ ID NO: 6 |
| Zm.GA2 oxidase_4 | SEQ ID NO: 7 | SEQ ID NO: 8 |
| Zm.GA2 oxidase_5 | SEQ ID NO: 9 | SEQ ID NO: 10 |
| Zm.GA2 oxidase_6 | SEQ ID NO: 11 | SEQ ID NO: 12 |
| Zm.GA2 oxidase_7 | SEQ ID NO: 13 | SEQ ID NO: 14 |
| Zm.GA2 oxidase_8 | SEQ ID NO: 15 | SEQ ID NO: 16 |
| Zm.GA2 oxidase_9 | SEQ ID NO: 17 | SEQ ID NO: 18 |
| Zm.GA2 oxidase_10 | SEQ ID NO: 19 | SEQ ID NO: 20 |
| Zm.GA2 oxidase_11 | SEQ ID NO: 21 | SEQ ID NO: 22 |
| Zm.GA2 oxidase_12 | SEQ ID NO: 23 | SEQ ID NO: 24 |
| Zm.GA2 oxidase_13 | SEQ ID NO: 25 | SEQ ID NO: 26 |

[0217] GA2 oxidase genes from other monocot or cereal plant species may also be used, such as rice, barley, wheat and Sorghum. According to embodiments of the present disclosure, a recombinant DNA molecule, construct or vector is provided comprising a transcribable DNA sequence encoding a GA2 oxidase protein from a monocot or cereal plant other than corn, or encoding a GA2 oxidase protein having at least a certain percent homology to a GA2 oxidase protein from a monocot or cereal plant other than corn. A family of at least ten GA2 oxidase genes have been identified in rice (Oryza sativa) plants including Os.GA2 oxidase_1, Os.GA2 oxidase_2, Os.GA2 oxidase_3, Os.GA2 oxidase_4, Os.GA2 oxidase_5, Os.GA2 oxidase_6, Os.GA2 oxidase_7, Os.GA2 oxidase_8, Os.GA2 oxidase_9, and Os.GA2 oxidase_10. The DNA and protein sequences by SEQ ID NO for each of these GA2 oxidase genes are provided in Table 2.

TABLE 2
DNA and protein sequences for GA2 oxidase genes in rice.

| | Coding Sequence | |
|---|---|---|
| GA2 oxidase Gene | (CDS) | Protein |
| Os.GA2 oxidase_1 | SEQ ID NO: 27 | SEQ ID NO: 28 |
| Os.GA2 oxidase_2 | SEQ ID NO: 29 | SEQ ID NO: 30 |
| Os.GA2 oxidase_3 | SEQ ID NO: 31 | SEQ ID NO: 32 |
| Os.GA2 oxidase_4 | SEQ ID NO: 33 | SEQ ID NO: 34 |
| Os.GA2 oxidase_5 | SEQ ID NO: 35 | SEQ ID NO: 36 |
| Os.GA2 oxidase_6 | SEQ ID NO: 37 | SEQ ID NO: 38 |
| Os.GA2 oxidase_7 | SEQ ID NO: 39 | SEQ ID NO: 40 |
| Os.GA2 oxidase_8 | SEQ ID NO: 41 | SEQ ID NO: 42 |
| Os.GA2 oxidase_9 | SEQ ID NO: 43 | SEQ ID NO: 44 |
| Os.GA2 oxidase_10 | SEQ ID NO: 45 | SEQ ID NO: 46 |

[0218] A family of at least eight GA2 oxidase genes have been identified in barley (Hordeum vulgare) plants including Hv.GA2 oxidase_1, Hv.GA2 oxidase_2, Hv.GA2 oxidase_3, Hv.GA2 oxidase_4 HvGA2 oxidase_5, Hv.GA2 oxidase_6, Hv.GA2 oxidase_7; and Hv.GA2 oxidase_8. The DNA and protein sequences by SEQ ID NO for each of these GA2 oxidase genes are provided in Table 3.

TABLE 3
DNA and protein sequences for GA2 oxidase genes in barley.

| | Coding Sequence | |
|---|---|---|
| GA2 oxidase Gene | (CDS) | Protein |
| Hv.GA2 oxidase_1 | SEQ ID NO: 47 | SEQ ID NO: 48 |
| Hv.GA2 oxidase_2 | SEQ ID NO: 49 | SEQ ID NO: 50 |
| Hv.GA2 oxidase_3 | SEQ ID NO: 51 | SEQ ID NO: 52 |
| Hv.GA2 oxidase_4 | SEQ ID NO: 53 | SEQ ID NO: 54 |
| Hv.GA2 oxidase_5 | SEQ ID NO: 55 | SEQ ID NO: 56 |
| Hv.GA2 oxidase_6 | SEQ ID NO: 57 | SEQ ID NO: 58 |
| Hv.GA2 oxidase_7 | SEQ ID NO: 59 | SEQ ID NO: 60 |
| Hv.GA2 oxidase_8 | SEQ ID NO: 61 | SEQ ID NO: 62 |

[0219] A family of at least sixteen GA2 oxidase genes have been identified in Sorghum (Sorghum bicolor) plants including Hv.GA2 oxidase_1, Sb.GA2 oxidase_2, Sb.GA2 oxidase_3, Sb.GA2 oxidase_4, Sb.GA2 oxidase_5, Sb.GA2 oxidase_6, Sb.GA2 oxidase_7 Sb.GA2 oxidase_8, Sb.GA2 oxidase_9, Sb.GA2 oxidase_10, Sb.GA2 oxidase_11, Sb.GA2 oxidase_12, Sb.GA2 oxidase_13, Sb.GA2 oxidase_14, Sb.GA2 oxidase_15, and Sb.GA2 oxidase_16. The DNA and protein sequences by SEQ ID NO for each of these GA2 oxidase genes are provided in Table 4.

TABLE 4
DNA and protein sequences for GA2 oxidase genes in sorghum.

| | Coding Sequence | |
|---|---|---|
| GA2 oxidase Gene | (CDS) | Protein |
| Sb.GA2 oxidase_1 | SEQ ID NO: 63 | SEQ ID NO: 64 |
| Sb.GA2 oxidase_2 | SEQ ID NO: 65 | SEQ ID NO: 66 |
| Sb.GA2 oxidase_3 | SEQ ID NO: 67 | SEQ ID NO: 68 |
| Sb.GA2 oxidase_4 | SEQ ID NO: 69 | SEQ ID NO: 70 |
| Sb.GA2 oxidase_5 | SEQ ID NO: 71 | SEQ ID NO: 72 |
| Sb.GA2 oxidase_6 | SEQ ID NO: 73 | SEQ ID NO: 74 |
| Sb.GA2 oxidase_7 | SEQ ID NO: 75 | SEQ ID NO: 76 |
| Sb.GA2 oxidase_8 | SEQ ID NO: 77 | SEQ ID NO: 78 |
| Sb.GA2 oxidase_9 | SEQ ID NO: 79 | SEQ ID NO: 80 |
| Sb.GA2 oxidase_10 | SEQ ID NO: 81 | SEQ ID NO: 82 |
| Sb.GA2 oxidase_11 | SEQ ID NO: 83 | SEQ ID NO: 84 |
| Sb.GA2 oxidase_12 | SEQ ID NO: 85 | SEQ ID NO: 86 |
| Sb.GA2 oxidase_13 | SEQ ID NO: 87 | SEQ ID NO: 88 |
| Sb.GA2 oxidase_14 | SEQ ID NO: 89 | SEQ ID NO: 90 |
| Sb.GA2 oxidase_15 | SEQ ID NO: 91 | SEQ ID NO: 92 |
| Sb.GA2 oxidase_16 | SEQ ID NO: 93 | SEQ ID NO: 94 |

[0220] A family of at least fifteen GA2 oxidase genes have been identified in wheat (Triticum aestivum) including Ta.GA2 oxidase_1, Ta.GA2 oxidase_2, Ta.GA2 oxidase_3, Ta.GA2 oxidase_4 Ta.GA2 oxidase_5, Ta.GA2 oxidase_6, Ta.GA2 oxidase_7 Ta.GA2 oxidase_8, Ta.GA2 oxidase_9, Ta.GA2 oxidase_10, Ta.GA2 oxidase_11 Ta.GA2 oxidase_12 Ta.GA2 oxidase_13, Ta.GA2 oxidase_14, and Ta.GA2 oxidase_15. The DNA and protein sequences by SEQ ID NO for each of these GA2 oxidase genes from wheat are provided in Table 5.

TABLE 5
DNA and protein sequences for GA2 oxidase genes in wheat.

| | Coding Sequence | |
|---|---|---|
| GA2 oxidase Gene | (CDS) | Protein |
| Ta.GA2 oxidase_1 | SEQ ID NO: 95 | SEQ ID NO: 96 |
| Ta.GA2 oxidase_2 | SEQ ID NO: 97 | SEQ ID NO: 98 |
| Ta.GA2 oxidase_3 | SEQ ID NO: 99 | SEQ ID NO: 100 |
| Ta.GA2 oxidase_4 | SEQ ID NO: 101 | SEQ ID NO: 102 |
| Ta.GA2 oxidase_5 | SEQ ID NO: 103 | SEQ ID NO: 104 |
| Ta.GA2 oxidase_6 | SEQ ID NO: 105 | SEQ ID NO: 106 |
| Ta.GA2 oxidase_7 | SEQ ID NO: 107 | SEQ ID NO: 108 |
| Ta.GA2 oxidase_8 | SEQ ID NO: 109 | SEQ ID NO: 110 |
| Ta.GA2 oxidase_9 | SEQ ID NO: 111 | SEQ ID NO: 112 |
| Ta.GA2 oxidase_10 | SEQ ID NO: 113 | SEQ ID NO: 114 |
| Ta.GA2 oxidase_11 | SEQ ID NO: 115 | SEQ ID NO: 116 |
| Ta.GA2 oxidase_12 | SEQ ID NO: 117 | SEQ ID NO: 118 |
| Ta.GA2 oxidase_13 | SEQ ID NO: 119 | SEQ ID NO: 120 |
| Ta.GA2 oxidase_14 | SEQ ID NO: 121 | SEQ ID NO: 122 |
| Ta.GA2 oxidase_15 | SEQ ID NO: 123 | SEQ ID NO: 124 |

[0221] In addition to the corn sequences listed in Table 1, a family of at least eleven GA2 oxidase genes have been identified in another corn (Zea Mays) germplasm line including Zm2.GA2 oxidase_1, Zm2.GA2 oxidase_2 Zm2GA2 oxidase_3, Zm2.GA2 oxidase_4, Zm2.GA2 oxidase_5, Zm2.GA2 oxidase_6, Zm2.GA2 oxidase_7, Zm2.GA2 oxidase_8, Zm2.GA2 oxidase_9, Zm2.GA2 oxidase_10, and Zm2.GA2 oxidase_11. The DNA and protein sequences by SEQ ID NO for each of these GA2 oxidase genes are provided in Table 6.

TABLE 6
Additional DNA and protein sequences
for GA2 oxidase genes in corn.

| GA2 | Coding Sequence | |
|---|---|---|
| oxidase Gene | (CDS) | Protein |
| Zm2.GA2 oxidase_1 | SEQ ID NO: 125 | SEQ ID NO: 126 |
| Zm2.GA2 oxidase_2 | SEQ ID NO: 127 | SEQ ID NO: 128 |
| Zm2.GA2 oxidase_3 | SEQ ID NO: 129 | SEQ ID NO: 130 |
| Zm2.GA2 oxidase_4 | SEQ ID NO: 131 | SEQ ID NO: 132 |
| Zm2.GA2 oxidase_5 | SEQ ID NO: 133 | SEQ ID NO: 134 |
| Zm2.GA2 oxidase_6 | SEQ ID NO: 135 | SEQ ID NO: 136 |
| Zm2.GA2 oxidase_7 | SEQ ID NO: 137 | SEQ ID NO: 138 |
| Zm2.GA2 oxidase_8 | SEQ ID NO: 139 | SEQ ID NO: 140 |
| Zm2.GA2 oxidase_9 | SEQ ID NO: 141 | SEQ ID NO: 142 |
| Zm2.GA2 oxidase_10 | SEQ ID NO: 143 | SEQ ID NO: 144 |
| Zm2.GA2 oxidase_11 | SEQ ID NO: 145 | SEQ ID NO: 146 |

[0222] According to embodiments of the present disclosure, a recombinant DNA molecule, construct or vector is provided comprising a transcribable DNA sequence encoding a GA2 oxidase protein from a dicot plant, such as a soybean, cotton, canola, Arabidopsis, moss (Physcomitrella patens), common bean (Phaseolus vulgaris), cottonwood (Populus trichocarpa), barrel clover (Medicago truncatula), pea (Pisum sativum), spinach (Spinacia oleracea) or whorled o (Paris polyphylla) plant, or encoding a GA2 oxidase protein having at least a certain percent homology to a GA2 oxidase protein from a monocot or cereal plant, such as a corn plant.

[0223] A family of at least sixteen GA2 oxidase genes have been identified in soybean (Glycine max) including Gm.GA2 oxidase_1, Gm.GA2 oxidase_2, Gm.GA2 oxidase_3, Gm.GA2 oxidase_4, Gm.GA2 oxidase_5, Gm.GA2 oxidase_6, Gm.GA2 oxidase_7, Gm.GA2 oxidase_8, Gm.GA2 oxidase_9, Gm.GA2 oxidase_10, Gm.GA2 oxidase_11, Gm.GA2 oxidase_12, Gm.GA2 oxidase_13, Gm.GA2 oxidase_14 Gm.GA2 oxidase_15, and Gm.GA2 oxidase_16. The DNA and protein sequences by SEQ ID NO for each of these GA2 oxidase genes from soybean are provided in Table 7.

TABLE 7
Additional DNA and protein sequences
for GA2 oxidase genes in soybean.

| GA2 | Coding Sequence | |
|---|---|---|
| oxidase Gene | (CDS) | Protein |
| Gm.GA2 oxidase_1 | SEQ ID NO: 147 | SEQ ID NO: 148 |
| Gm.GA2 oxidase_2 | SEQ ID NO: 149 | SEQ ID NO: 150 |
| Gm.GA2 oxidase_3 | SEQ ID NO: 151 | SEQ ID NO: 152 |
| Gm.GA2 oxidase_4 | SEQ ID NO: 153 | SEQ ID NO: 154 |
| Gm.GA2 oxidase_5 | SEQ ID NO: 155 | SEQ ID NO: 156 |
| Gm.GA2 oxidase_6 | SEQ ID NO: 157 | SEQ ID NO: 158 |
| Gm.GA2 oxidase_7 | SEQ ID NO: 159 | SEQ ID NO: 160 |
| Gm.GA2 oxidase_8 | SEQ ID NO: 161 | SEQ ID NO: 162 |
| Gm.GA2 oxidase_9 | SEQ ID NO: 163 | SEQ ID NO: 164 |
| Gm.GA2 oxidase_10 | SEQ ID NO: 165 | SEQ ID NO: 166 |
| Gm.GA2 oxidase_11 | SEQ ID NO: 167 | SEQ ID NO: 168 |
| Gm.GA2 oxidase_12 | SEQ ID NO: 169 | SEQ ID NO: 170 |
| Gm.GA2 oxidase_13 | SEQ ID NO: 171 | SEQ ID NO: 172 |
| Gm.GA2 oxidase_14 | SEQ ID NO: 173 | SEQ ID NO: 174 |
| Gm.GA2 oxidase_15 | SEQ ID NO: 175 | SEQ ID NO: 176 |
| Gm.GA2 oxidase_16 | SEQ ID NO: 177 | SEQ ID NO: 178 |

[0224] A family of at least fifteen related GA2 oxidase genes have been identified in cotton (Gossypium hirsutum)including Gh.GA2 oxidase_1, Gh.GA2 oxidase_2, Gh.GA2 oxidase_3, Gh.GA2 oxidase_4, Gh.GA2 oxidase_5, Gh.GA2 oxidaseQ6, Gh.GA2 oxidase_7, Gh.GA2 oxidase_8, Gh.GA2 oxidase_9, Gh.GA2 oxidase_10, Gh.GA2 oxidase_1, Gh.GA2 oxidase_12 Gh.GA2 oxidase_13, Gh.GA2 oxidase_14, and Gh.GA2 oxidase_15. The DNA and protein sequences by SEQ ID NO for each of these GA2 oxidase genes from cotton are provided in Table 8.

TABLE 8
DNA and protein sequences for GA2 oxidase genes in cotton.

| GA2 | Coding Sequence | |
|---|---|---|
| oxidase Gene | (CDS) | Protein |
| Gh.GA2 oxidase_1 | SEQ ID NO: 179 | SEQ ID NO: 180 |
| Gh.GA2 oxidase_2 | SEQ ID NO: 181 | SEQ ID NO: 182 |
| Gh.GA2 oxidase_3 | SEQ ID NO: 183 | SEQ ID NO: 184 |
| Gh.GA2 oxidase_4 | SEQ ID NO: 185 | SEQ ID NO: 186 |
| Gh.GA2 oxidase_5 | SEQ ID NO: 187 | SEQ ID NO: 188 |
| Gh.GA2 oxidase_6 | SEQ ID NO: 189 | SEQ ID NO: 190 |
| Gh.GA2 oxidase_7 | SEQ ID NO: 191 | SEQ ID NO: 192 |
| Gh.GA2 oxidase_8 | SEQ ID NO: 193 | SEQ ID NO: 194 |
| Gh.GA2 oxidase_9 | SEQ ID NO: 195 | SEQ ID NO: 196 |
| Gh.GA2 oxidase_10 | SEQ ID NO: 197 | SEQ ID NO: 198 |
| Gh.GA2 oxidase_11 | SEQ ID NO: 199 | SEQ ID NO: 200 |
| Gh.GA2 oxidase_12 | SEQ ID NO: 201 | SEQ ID NO: 202 |
| Gh.GA2 oxidase_13 | SEQ ID NO: 203 | SEQ ID NO: 204 |
| Gh.GA2 oxidase_14 | SEQ ID NO: 205 | SEQ ID NO: 206 |
| Gh.GA2 oxidase_15 | SEQ ID NO: 207 | SEQ ID NO: 208 |

[0225] A family of at least fifteen GA2 oxidase genes have been identified in canola (Brassica napus) including Bn.GA2 oxidase_1, Bn.GA2 oxidase_2, Bn.GA2 oxidase_3, Bn.GA2 oxidase_4, Bn.GA2 oxidase_5, Bn.GA2 oxidase_6, Bn.GA2 oxidase_7, Bn.GA2 oxidase_8, Bn.GA2 oxidase_9, Bn.GA2 oxidase_10, Bn.GA2 oxidaseQ11, Bn.GA2 oxidase_12, Bn.GA2 oxidase_13, Bn.GA2 oxidase_14, and Bn.GA2 oxidase_15. The DNA and protein sequences by SEQ ID NO for each of these GA2 oxidase genes from canola are provided in Table 9.

TABLE 9
DNA and protein sequences for GA2 oxidase genes in canola.

| GA2 | Coding Sequence | |
|---|---|---|
| oxidase Gene | (CDS) | Protein |
| Bn.GA2 oxidase_1 | SEQ ID NO: 209 | SEQ ID NO: 210 |
| Bn.GA2 oxidase_2 | SEQ ID NO: 211 | SEQ ID NO: 212 |
| Bn.GA2 oxidase_3 | SEQ ID NO: 213 | SEQ ID NO: 214 |
| Bn.GA2 oxidase_4 | SEQ ID NO: 215 | SEQ ID NO: 216 |
| Bn.GA2 oxidase_5 | SEQ ID NO: 217 | SEQ ID NO: 218 |
| Bn.GA2 oxidase_6 | SEQ ID NO: 219 | SEQ ID NO: 220 |
| Bn.GA2 oxidase_7 | SEQ ID NO: 221 | SEQ ID NO: 222 |
| Bn.GA2 oxidase_8 | SEQ ID NO: 223 | SEQ ID NO: 224 |
| Bn.GA2 oxidase_9 | SEQ ID NO: 225 | SEQ ID NO: 226 |
| Bn.GA2 oxidase_10 | SEQ ID NO: 227 | SEQ ID NO: 228 |
| Bn.GA2 oxidase_11 | SEQ ID NO: 229 | SEQ ID NO: 230 |
| Bn.GA2 oxidase_12 | SEQ ID NO: 231 | SEQ ID NO: 232 |
| Bn.GA2 oxidase_13 | SEQ ID NO: 233 | SEQ ID NO: 234 |
| Bn.GA2 oxidase_14 | SEQ ID NO: 235 | SEQ ID NO: 236 |
| Bn.GA2 oxidase_15 | SEQ ID NO: 237 | SEQ ID NO: 238 |

[0226] A family of at least seven GA2 oxidase genes have been identified in thale cress (Arabidopsis thaliana) including At.GA2 oxidase_1, At.GA2 oxidase_2, At.GA2 oxidase_3, At.GA2 oxidase_4, At.GA2 oxidase_6, and At.GA2 oxidase_7, and At.GA2 oxidase_8. The DNA and protein sequences by SEQ ID NO for each of these GA2 oxidase genes from Arabidopsis are provided in Table 10.

TABLE 10
DNA and protein sequences for GA2 oxidase genes in thale cress.

| GA2 | Coding Sequence | |
|---|---|---|
| oxidase Gene | (CDS) | Protein |
| At.GA2 oxidase_1 | SEQ ID NO: 239 | SEQ ID NO: 240 |
| At.GA2 oxidase_2 | SEQ ID NO: 241 | SEQ ID NO: 242 |
| At.GA2 oxidase_3 | SEQ ID NO: 243 | SEQ ID NO: 244 |
| At.GA2 oxidase_4 | SEQ ID NO: 245 | SEQ ID NO: 246 |
| At.GA2 oxidase_6 | SEQ ID NO: 247 | SEQ ID NO: 248 |
| At.GA2 oxidase_7 | SEQ ID NO: 249 | SEQ ID NO: 250 |
| At.GA2 oxidase_8 | SEQ ID NO: 251 | SEQ ID NO: 252 |

[0227] A family of at least seven GA2 oxidase genes have been identified in moss (Physcomitrella patens) including Pp.GA2 oxidase_1, Pp.GA2 oxidase_2, Pp.GA2 oxidase_3, Pp.GA2 oxidase_4, Pp.GA2 oxidase_5, Pp.GA2 oxidase_6, and Pp.GA2 oxidase_7. The DNA and protein sequences by SEQ ID NO for each of these GA2 oxidase genes from moss are provided in Table 11.

TABLE 11
DNA and protein sequences for GA2 oxidase genes in moss.

| GA2 | Coding Sequence | |
|---|---|---|
| oxidase Gene | (CDS) | Protein |
| Pp.GA2 oxidase_1 | SEQ ID NO: 253 | SEQ ID NO: 254 |
| Pp.GA2 oxidase_2 | SEQ ID NO: 255 | SEQ ID NO: 256 |
| Pp.GA2 oxidase_3 | SEQ ID NO: 257 | SEQ ID NO: 258 |
| Pp.GA2 oxidase_4 | SEQ ID NO: 259 | SEQ ID NO: 260 |
| Pp.GA2 oxidase_5 | SEQ ID NO: 261 | SEQ ID NO: 262 |
| Pp.GA2 oxidase_6 | SEQ ID NO: 263 | SEQ ID NO: 264 |
| Pp.GA2 oxidase_7 | SEQ ID NO: 265 | SEQ ID NO: 266 |

[0228] A family of at least nine GA2 oxidase genes have been identified in barrel clover (Medicago truncatula) including Mt.GA2 oxidase_1, Mt.GA2 oxidase_2, Mt.GA2 oxidase_3, Mt.GA2 oxidase_4, Mt.GA2 oxidase_5, Mt.GA2 oxidase_6, Mt.GA2 oxidase_7Q Mt:GA2 oxidase_8, and Mt.GA2 oxidase_9. The DNA and protein sequences by SEQ ID NO for each of these GA2 oxidase genes from Medicago are provided in Table 12.

TABLE 12
DNA and protein sequences for GA2
oxidase genes in M. truncatula.

| GA2 | Coding Sequence | |
|---|---|---|
| oxidase Gene | (CDS) | Protein |
| Mt.GA2 oxidase_1 | SEQ ID NO: 267 | SEQ ID NO: 268 |
| Mt.GA2 oxidase_2 | SEQ ID NO: 269 | SEQ ID NO: 270 |
| Mt.GA2 oxidase_3 | SEQ ID NO: 271 | SEQ ID NO: 272 |
| Mt.GA2 oxidase_4 | SEQ ID NO: 273 | SEQ ID NO: 274 |
| Mt.GA2 oxidase_5 | SEQ ID NO: 275 | SEQ ID NO: 276 |
| Mt.GA2 oxidase_6 | SEQ ID NO: 277 | SEQ ID NO: 278 |
| Mt.GA2 oxidase_7 | SEQ ID NO: 279 | SEQ ID NO: 280 |
| Mt.GA2 oxidase_8 | SEQ ID NO: 281 | SEQ ID NO: 282 |
| Mt.GA2 oxidase_9 | SEQ ID NO: 283 | SEQ ID NO: 284 |

[0229] A family of at least four related GA2 oxidase genes have been identified in whorled honey flower (Paris polyphylla) including Ppo.GA2 oxidase_1, Ppo.GA2 oxidaseQ2, Ppo.GA2 oxidase_3, and Ppo.GA2 oxidase_4. The DNA and protein sequences by SEQ ID NO for each of these GA2 oxidase genes from honey flower are provided in Table 13.

TABLE 13
DNA and protein sequences for GA2
oxidase genes in P. polyphylla.

| GA2 | Coding Sequence | |
|---|---|---|
| oxidase Gene | (CDS) | Protein |
| Ppo.GA2 oxidase_1 | SEQ ID NO: 285 | SEQ ID NO: 286 |
| Ppo.GA2 oxidase_2 | SEQ ID NO: 287 | SEQ ID NO: 288 |
| Ppo.GA2 oxidase_3 | SEQ ID NO: 289 | SEQ ID NO: 290 |
| Ppo.GA2 oxidase_4 | SEQ ID NO: 291 | SEQ ID NO: 292 |

[0230] A family of at least eight GA2 oxidase genes have been identified in common bean (Phaseolus vulgaris) including Pv.GA2 oxidase_1, Pv.GA2 oxidase_2, Pv.GA2 oxidase_3, Pv.GA2 oxidase_4, Pv.GA2 oxidase_5, Pv.GA2 oxidase_6, Pv.GA2 oxidase_7 and Pv.GA2 oxidase_8. The DNA and protein sequences by SEQ ID NO for each of these GA2 oxidase genes from common bean are provided in Table 14.

TABLE 14
DNA and protein sequences for GA2
oxidase genes in common bean.

| GA2 | Coding Sequence | |
|---|---|---|
| oxidase Gene | (CDS) | Protein |
| Pv.GA2 oxidase_1 | SEQ ID NO: 293 | SEQ ID NO: 294 |
| Pv.GA2 oxidase_2 | SEQ ID NO: 295 | SEQ ID NO: 296 |
| Pv.GA2 oxidase_3 | SEQ ID NO: 297 | SEQ ID NO: 298 |
| Pv.GA2 oxidase_4 | SEQ ID NO: 299 | SEQ ID NO: 300 |
| Pv.GA2 oxidase_5 | SEQ ID NO: 301 | SEQ ID NO: 302 |
| Pv.GA2 oxidase_6 | SEQ ID NO: 303 | SEQ ID NO: 304 |
| Pv.GA2 oxidase_7 | SEQ ID NO: 305 | SEQ ID NO: 306 |
| Pv.GA2 oxidase_8 | SEQ ID NO: 307 | SEQ ID NO: 308 |

[0231] A family of at least seven related GA2 oxidase genes have been identified in cottonwood (Populus trichocarpa) including Pt.GA2 oxidase_1, Pt.GA2 oxidase_2, Pt.GA2 oxidase_3, Pt.GA2 oxidase_4, Pt.GA2 oxidase_5, Pt.GA2 oxidase_6, and Pt.GA2 oxidase_7. The DNA and protein sequences by SEQ ID NO for each of these GA2 oxidase genes from cottonwood are provided in Table 15.

TABLE 15
DNA and protein sequences for GA2 oxidase genes in cottonwood.

| GA2 | Coding Sequence | |
|---|---|---|
| oxidase Gene | (CDS) | Protein |
| Pt.GA2 oxidase_1 | SEQ ID NO: 309 | SEQ ID NO: 310 |
| Pt.GA2 oxidase_2 | SEQ ID NO: 311 | SEQ ID NO: 312 |
| Pt.GA2 oxidase_3 | SEQ ID NO: 313 | SEQ ID NO: 314 |
| Pt.GA2 oxidase_4 | SEQ ID NO: 315 | SEQ ID NO: 316 |
| Pt.GA2 oxidase_5 | SEQ ID NO: 317 | SEQ ID NO: 318 |
| Pt.GA2 oxidase_6 | SEQ ID NO: 319 | SEQ ID NO: 320 |
| Pt.GA2 oxidase_7 | SEQ ID NO: 321 | SEQ ID NO: 322 |

[0232] A family of at least two GA2 oxidase genes have been identified in pea (Pisum sativum) including Ps.GA2 oxidase_1, and Ps.GA2 oxidase_2. The DNA and protein sequences by SEQ ID NO for these GA2 oxidase genes from pea are provided in Table 16.

TABLE 16
DNA and protein sequences for GA2 oxidase genes in pea.

| GA2 | Coding Sequence | |
|---|---|---|
| oxidase Gene | (CDS) | Protein |
| Ps.GA2 oxidase_1 | SEQ ID NO: 323 | SEQ ID NO: 324 |
| Ps.GA2 oxidase_2 | SEQ ID NO: 325 | SEQ ID NO: 326 |

[0233] A family of at least three related GA2 oxidase genes have been identified in spinach (Spinacia oleracea) including So.GA2 oxidase_1, So.GA2 oxidase_2, and So.GA2 oxidase_3. The DNA and protein sequences by SEQ ID NO for each of these GA2 oxidase genes from spinach are provided in Table 17.

TABLE 17
DNA and protein sequences for GA2 oxidase genes in spinach.

| GA2 | Coding Sequence | |
|---|---|---|
| oxidase Gene | (CDS) | Protein |
| So.GA2 oxidase_1 | SEQ ID NO: 327 | SEQ ID NO: 328 |
| So.GA2 oxidase_2 | SEQ ID NO: 329 | SEQ ID NO: 330 |
| So.GA2 oxidase_3 | SEQ ID NO: 331 | SEQ ID NO: 332 |

[0234] According to embodiments of the present disclosure, a recombinant DNA molecule, vector or construct is provided comprising a transcribable DNA sequence encoding a GA2 oxidase mRNA and protein, wherein the GA2 oxidase protein comprises a sequence that is at least 80%, at least 85%, at least 90%, at least 95%, at least 96%, at least 97%, at least 98%, at least 99%, at least 99.5%, or 100% identical to a known GA2 oxidase protein sequence, wherein the transcribable DNA sequence is operably linked to a plant-expressible promoter, and wherein the plant is a corn plant.

[0235] According to some embodiments, a GA2 oxidase protein encoded by a transcribable DNA sequence of a recombinant DNA molecule, vector or construct is or comprises a sequence that is at least 80%, at least 85%, at least 90%, at least 95%, at least 96%, at least 97%, at least 98%, at least 99%, at least 99.5%, or 100% identical to a protein sequence from a monocot or cereal plant. According to some embodiments, a GA2 oxidase protein encoded by a transcribable DNA sequence of a recombinant DNA molecule, vector or construct is or comprises a sequence that is at least 80%, at least 85%, at least 90%, at least 95%, at least 96%, at least 97%, at least 98%, at least 99%, at least 99.5%, or 100% identical to one or more of SEQ ID NOs: 2, 4, 6, 8, 10, 12, 14, 16, 18, 20, 22, 24 and/or 26. According to some embodiments, a transcribable DNA sequence of a recombinant DNA molecule, vector or construct is or comprises a sequence that is at least 80%, at least 85%, at least 90%, at least 95%, at least 96%, at least 97%, at least 98%, at least 99%, at least 99.5%, or 100% identical to one or more of SEQ ID NOs: 1, 3, 5, 7, 9, 11, 13, 15, 17, 19, 21, 23 and/or 25. According to some embodiments, a GA2 oxidase protein encoded by a transcribable DNA sequence of a recombinant DNA molecule, vector or construct is or comprises a sequence that is at least 80%, at least 85%, at least 90%, at least 95%, at least 96%, at least 97%, at least 98%, at least 99%, at least 99.5%, or 100% identical to one or more of SEQ ID NOs: 28, 30, 32, 34, 36, 38, 40, 42, 44 and/or 46. According to some embodiments, a transcribable DNA sequence of a recombinant DNA molecule, vector or construct is or comprises a sequence that is at least 80%, at least 85%, at least 90%, at least 95%, at least 96%, at least 97%, at least 98%, at least 99%, at least 99.5%, or 100% identical to one or more of SEQ ID NOs: 27, 29, 31, 33, 35, 37, 39, 41, 43 and/or 45. According to some embodiments, a GA2 oxidase protein encoded by a transcribable DNA sequence of a recombinant DNA molecule, vector or construct is or comprises a sequence that is at least 80%, at least 85%, at least 90%, at least 95%, at least 96%, at least 97%, at least 98%, at least 99%, at least 99.5%, or 100% identical to one or more of SEQ ID NOs: 48, 50, 52, 54, 56, 58, 60 and/or 62. According to some embodiments, a transcribable DNA sequence of a recombinant DNA molecule, vector or construct is or comprises a sequence that is at least 80%, at least 85%, at least 90%, at least 95%, at least 96%, at least 97%, at least 98%, at least 99%, at least 99.5%, or 100% identical to one or more of SEQ ID NOs: 47, 49, 51, 53, 55, 57, 59 and/or 61. According to some embodiments, a GA2 oxidase protein encoded by a transcribable DNA sequence of a recombinant DNA molecule, vector or construct is or comprises a sequence that is at least 80%, at least 85%, at least 90%, at least 95%, at least 96%, at least 97%, at least 98%, at least 99%, at least 99.5%, or 100% identical to one or more of SEQ ID NOs: 64, 66, 68, 70, 72, 74, 76, 78, 80, 82, 84, 86, 88, 90, 92 and/or 94. According to some embodiments, a transcribable DNA sequence of a recombinant DNA molecule, vector or construct is or comprises a sequence that is at least 80%, at least 85%, at least 90%, at least 95%, at least 96%, at least 97%, at least 98%, at least 99%, at least 99.5%, or 100% identical to one or more of SEQ ID NOs: 63, 65, 67, 69, 71, 73, 75, 77, 79, 81, 83, 85, 87, 89, 91 and/or 93. According to some embodiments, a GA2 oxidase protein encoded by a transcribable DNA sequence of a recombinant DNA molecule, vector or construct is or comprises a sequence that is at least 80%, at least 85%, at least 90%, at least 95%, at least 96%, at least 97%, at least 98%, at least 99%, at least 99.5%, or 100% identical to one or more of SEQ ID NOs: 96, 98, 100, 102, 104, 106, 108, 110, 112, 114, 116, 118, 120, 122 and/or 124. According to some embodiments, a transcribable DNA sequence of a recombinant DNA molecule, vector or construct is or comprises a sequence that is at least 80%, at least 85%, at least 90%, at least 95%, at least 96%, at least 97%, at least 98%, at least 99%, at least 99.5%, or 100% identical to one or more of SEQ ID NOs: 95, 97, 99, 101, 103, 105, 107, 109, 111, 113, 115, 117, 119, 121 and/or 123. According to some embodiments, a GA2 oxidase protein encoded by a transcribable DNA sequence of a recombinant DNA molecule, vector or construct is or comprises a sequence that is at least 80%, at least 85%, at least 90%, at least 95%, at least 96%, at least 97%, at least 98%, at least 99%, at least 99.5%, or 100% identical to one or more of SEQ ID NOs: 126, 128, 130, 132, 134, 136, 138, 140, 142, 144 and/or 146. According to some embodiments, a transcribable DNA sequence of a recombinant DNA molecule, vector or construct is or comprises a sequence that is at least 80%, at least 85%, at least 90%, at least 95%, at least 96%, at least 97%, at least 98%, at least 99%, at least 99.5%, or 100% identical to one or more of SEQ ID NOs: 125, 127, 129, 131, 133, 135, 137, 139, 141, 143 and/or 145.

[0236] According to some embodiments, a GA2 oxidase protein encoded by a transcribable DNA sequence of a recombinant DNA molecule, vector or construct is or comprises a sequence that is at least 80%, at least 85%, at least 90%, at least 95%, at least 96%, at least 97%, at least 98%, at least 99%, at least 99.5%, or 100% identical to a protein sequence from a dicot or leguminous plant. According to some embodiments, a GA2 oxidase protein encoded by a transcribable DNA sequence of a recombinant DNA molecule, vector or construct is or comprises a sequence that is at least 80%, at least 85%, at least 90%, at least 95%, at least 96%, at least 97%, at least 98%, at least 99%, at least 99.5%, or 100% identical to one or more of SEQ ID NOs: 148, 150, 152, 154, 156, 158, 160, 162, 164, 166, 168, 170, 172, 174, 176 and/or 178. According to some embodiments, a transcribable DNA sequence of a recombinant DNA molecule, vector or construct is or comprises a sequence that is at least 80%, at least 85%, at least 90%, at least 95%, at least 96%, at least 97%, at least 98%, at least 99%, at least 99.5%, or 100% identical to one or more of SEQ ID NOs: 147, 149, 151, 153, 155, 157, 159, 161, 163, 165, 167, 169, 171, 173, 175 and/or 177. According to some embodiments, a GA2 oxidase protein encoded by a transcribable DNA sequence of a recombinant DNA molecule, vector or construct is or comprises a sequence that is at least 80%, at least 85%, at least 90%, at least 95%, at least 96%, at least 97%, at least 98%, at least 99%, at least 99.5%, or 100% identical to one or more of SEQ ID NOs: 180, 182, 184, 186, 188, 190, 192, 194, 196, 198, 200, 202, 204, 206 and/or 208. According to some embodiments, a transcribable DNA sequence of a recombinant DNA molecule, vector or construct is or comprises a sequence that is at least 80%, at least 85%, at least 90%, at least 95%, at least 96%, at least 97%, at least 98%, at least 99%, at least 99.5%, or 100% identical to one or more of SEQ ID NOs: 179, 181, 183, 185, 187, 189, 191, 193, 195, 197, 199, 201, 203, 205 and/or 207. According to some embodiments, a GA2 oxidase protein encoded by a transcribable DNA sequence of a recombinant DNA molecule, vector or construct is or comprises a sequence that is at least 80%, at least 85%, at least 90%, at least 95%, at least 96%, at least 97%, at least 98%, at least 99%, at least 99.5%, or 100% identical to one or more of SEQ ID NOs: 210, 212, 214, 216, 218, 220, 222, 224, 226, 228, 230, 232, 234, 236 and/or 238. According to some embodiments, a transcribable DNA sequence of a recombinant DNA molecule, vector or construct is or comprises a sequence that is at least 80%, at least 85%, at least 90%, at least 95%, at least 96%, at least 97%, at least 98%, at least 99%, at least 99.5%, or 100% identical to one or more of SEQ ID NOs: 209, 211, 213, 215, 217, 219, 221, 223, 225, 227, 229, 231, 233, 235 and/or 237. According to some embodiments, a GA2 oxidase protein encoded by a transcribable DNA sequence of a recombinant DNA molecule, vector or construct is or comprises a sequence that is at least 80%, at least 85%, at least 90%, at least 95%, at least 96%, at least 97%, at least 98%, at least 99%, at least 99.5%, or 100% identical to one or more of SEQ ID NOs: 240, 242, 244, 246, 248, 250 and/or 252. According to some embodiments, a transcribable DNA sequence of a recombinant DNA molecule, vector or construct is or comprises a sequence that is at least 80%, at least 85%, at least 90%, at least 95%, at least 96%, at least 97%, at least 98%, at least 99%, at least 99.5%, or 100% identical to one or more of SEQ ID NOs: 239, 241, 243, 245, 247, 249 and/or 251. According to some embodiments, a GA2 oxidase protein encoded by a transcribable DNA sequence of a recombinant DNA molecule, vector or construct is or comprises a sequence that is at least 80%, at least 85%, at least 90%, at least 95%, at least 96%, at least 97%, at least 98%, at least 99%, at least 99.5%, or 100% identical to one or more of SEQ ID NOs: 254, 256, 258, 260, 262, 264 and/or 266. According to some embodiments, a transcribable DNA sequence of a recombinant DNA molecule, vector or construct is or comprises a sequence that is at least 80%, at least 85%, at least 90%, at least 95%, at least 96%, at least 97%, at least 98%, at least 99%, at least 99.5%, or 100% identical to one or more of SEQ ID NOs: 253, 255, 257, 259, 261, 263 and/or 265. According to some embodiments, a GA2 oxidase protein encoded by a transcribable DNA sequence of a recombinant DNA molecule, vector or construct is or comprises a sequence that is at least 80%, at least 85%, at least 90%, at least 95%, at least 96%, at least 97%, at least 98%, at least 99%, at least 99.5%, or 100% identical to one or more of SEQ ID NOs: 268, 270, 272, 274, 276, 278, 280, 282 and/or 284. According to some embodiments, a transcribable DNA sequence of a recombinant DNA molecule, vector or construct is or comprises a sequence that is at least 80%, at least 85%, at least 90%, at least 95%, at least 96%, at least 97%, at least 98%, at least 99%, at least 99.5%, or 100% identical to one or more of SEQ ID NOs: 267, 269, 271, 273, 275, 277, 279, 281 and/or 283. According to some embodiments, a GA2 oxidase protein encoded by a transcribable DNA sequence of a recombinant DNA molecule, vector or construct is or comprises a sequence that is at least 80%, at least 85%, at least 90%, at least 95%, at least 96%, at least 97%, at least 98%, at least 99%, at least 99.5%, or 100% identical to one or more of SEQ ID NOs: 286, 288, 290 and/or 292. According to some embodiments, a transcribable DNA sequence of a recombinant DNA molecule, vector or construct is or comprises a sequence that is at least 80%, at least 85%, at least 90%, at least 95%, at least 96%, at least 97%, at least 98%, at least 99%, at least 99.5%, or 100% identical to one or more of SEQ ID NOs: 285, 287, 289 and/or 291. According to some embodiments, a GA2 oxidase protein encoded by a transcribable DNA sequence of a recombinant DNA molecule, vector or construct is or comprises a sequence that is at least 80%, at least 85%, at least 90%, at least 95%, at least 96%, at least 97%, at least 98%, at least 99%, at least 99.5%, or 100% identical to one or more of SEQ ID NOs: 294, 296, 298, 300, 302, 304, 306 and/or 308. According to some embodiments, a transcribable DNA sequence of a recombinant DNA molecule, vector or construct is or comprises a sequence that is at least 80%, at least 85%, at least 90%, at least 95%, at least 96%, at least 97%, at least 98%, at least 99%, at least 99.5%, or 100% identical to one or more of SEQ ID NOs: 293, 295, 297, 299, 301, 303, 305 and/or 307. According to some embodiments, a GA2 oxidase protein encoded by a transcribable DNA sequence of a recombinant DNA molecule, vector or construct is or comprises a sequence that is at least 80%, at least 85%, at least 90%, at least 95%, at least 96%, at least 97%, at least 98%, at least 99%, at least 99.5%, or 100% identical to one or more of SEQ ID NOs: 310, 312, 314, 316, 318, 320 and/or 322. According to some embodiments, a transcribable DNA sequence of a recombinant DNA molecule, vector or construct is or comprises a sequence that is at least 80%, at least 85%, at least 90%, at least 95%, at least 96%, at least 97%, at least 98%, at least 99%, at least 99.5%, or 100% identical to one or more of SEQ ID NOs: 309, 311, 313, 315, 317, 319 and/or 321. According to some embodiments, a GA2 oxidase protein encoded by a transcribable DNA sequence of a recombinant DNA molecule, vector or construct is or comprises a sequence that is at least 80%, at least 85%, at least 90%, at least 95%, at least 96%, at least 97%, at least 98%, at least 99%, at least 99.5%, or 100% identical to one or more of SEQ ID NOs: 324 and/or 326. According to some embodiments, a transcribable DNA sequence of a recombinant DNA molecule, vector or construct is or comprises a sequence that is at least 80%, at least 85%, at least 90%, at least 95%, at least 96%, at least 97%, at least 98%, at least 99%, at least 99.5%, or 100% identical to one or more of SEQ ID NOs: 323 and/or 325. According to some embodiments, a GA2 oxidase protein encoded by a transcribable DNA sequence of a recombinant DNA molecule, vector or construct is or comprises a sequence that is at least 80%, at least 85%, at least 90%, at least 95%, at least 96%, at least 97%, at least 98%, at least 99%, at least 99.5%, or 100% identical to one or more of SEQ ID NOs: 328, 330 and/or 332. According to some embodiments, a transcribable DNA sequence of a recombinant DNA molecule, vector or construct is or comprises a sequence that is at least 80%, at least 85%, at least 90%, at least 95%, at least 96%, at least 97%, at least 98%, at least 99%, at least 99.5%, or 100% identical to one or more of SEQ ID NOs: 327, 329 and/or 331.

[0237] According to some embodiments, a GA2 oxidase protein encoded by a transcribable DNA sequence of a recombinant DNA molecule, vector or construct is or comprises a sequence that is at least 80%, at least 85%, at least 90%, at least 95%, at least 96%, at least 97%, at least 98%, at least 99%, at least 99.5%, or 100% identical to one or more of SEQ ID NOs: 2, 4, 6, 8, 10, 12, 14, 16, 18, 20, 22, 24, 26, 28, 30, 32, 34, 36, 38, 40, 42, 44, 46, 48, 50, 52, 54, 56, 58, 60, 62, 64, 66, 68, 70, 72, 74, 76, 78, 80, 82, 84, 86, 88, 90, 92, 94, 96, 98, 100, 102, 104, 106, 108, 110, 112, 114, 116, 118, 120, 122, 124, 126, 128, 130, 132, 134, 136, 138, 140, 142, 144 and/or 146. According to some embodiments, a transcribable DNA sequence of a recombinant DNA molecule, vector or construct is or comprises a sequence that is at least 80%, at least 85%, at least 90%, at least 95%, at least 96%, at least 97%, at least 98%, at least 99%, at least 99.5%, or 100% identical to one or more of SEQ ID NOs: 1, 3, 5, 7, 9, 11, 13, 15, 17, 19, 21, 23, 25, 27, 29, 31, 33, 35, 37, 39, 41, 43, 45, 47, 49, 51, 53, 55, 57, 59, 61, 63, 65, 67, 69, 71, 73, 75, 77, 79, 81, 83, 85, 87, 89, 91, 93, 95, 97, 99, 101, 103, 105, 107, 109, 111, 113, 115, 117, 119, 121, 123, 125, 127, 129, 131, 133, 135, 137, 139, 141, 143 and/or 145.

[0238] According to some embodiments, a GA2 oxidase protein encoded by a transcribable DNA sequence of a recombinant DNA molecule, vector or construct is or comprises a sequence that is at least 80%, at least 85%, at least 90%, at least 95%, at least 96%, at least 97%, at least 98%, at least 99%, at least 99.5%, or 100% identical to one or more of SEQ ID NOs: 148, 150, 152, 154, 156, 158, 160, 162, 164, 166, 168, 170, 172, 174, 176, 178, 180, 182, 184, 186, 188, 190, 192, 194, 196, 198, 200, 202, 204, 206, 208, 210, 212, 214, 216, 218, 220, 222, 224, 226, 228, 230, 232, 234, 236, 238, 240, 242, 244, 246, 248, 250, 252, 254, 256, 258, 260, 262, 264, 266, 268, 270, 272, 274, 276, 278, 280, 282, 284, 286, 288, 290, 292, 294, 296, 298, 300, 302, 304, 306, 308, 310, 312, 314, 316, 318, 320, 322, 324, 326, 328, 330 and/or 332. According to some embodiments, a transcribable DNA sequence of a recombinant DNA molecule, vector or construct is or comprises a sequence that is at least 80%, at least 85%, at least 90%, at least 95%, at least 96%, at least 97%, at least 98%, at least 99%, at least 99.5%, or 100% identical to one or more of SEQ ID NOs: 147, 149, 151, 153, 155, 157, 159, 161, 163, 165, 167, 169, 171, 173, 175, 177, 179, 181, 183, 185, 187, 189, 191, 193, 195, 197, 199, 201, 203, 205, 207, 209, 211, 213, 215, 217, 219, 221, 223, 225, 227, 229, 231, 233, 235, 237, 239, 241, 243, 245, 247, 249, 251, 253, 255, 257, 259, 261, 263, 265, 267, 269, 271, 273, 275, 277, 279, 281, 283, 285, 287, 289, 291, 293, 295, 297, 299, 301, 303, 305, 307, 309, 311, 313, 315, 317, 319, 321, 323, 325, 327, 329 and/or 331.

[0239] According to embodiments of the present invention, the level(s) of one or more active GAs may be reduced in the stalk or stem of a corn plant by ectopically expressing a catabolic GA2 oxidase gene to produce the short stature phenotype and resistance to lodging in transgenic plants, but without off-types in the reproductive or ear tissues of the plant.

[0240] According to embodiments of the present invention, expression of a GA2 oxidase transgene may be driven by a variety of different plant-expressible promoter types including constitutive and tissue-specific or tissue-preferred promoters, such as a vascular or leaf promoter. According to present embodiments, a recombinant DNA molecule, vector or construct for expression of a GA2 oxidase transgene in a plant is provided comprising a transcribable DNA sequence encoding a protein that is at least 80%, at least 85%, at least 90%, at least 95%, at least 96%, at least 97%, at least 98%, at least 99%, at least 99.5%, or 100% identical to a GA2 oxidase protein sequence provided herein, wherein the transcribable DNA sequence is operably linked to a plant-expressible promoter, such as a constitutive, vascular or leaf promoter. According to some embodiments, a recombinant DNA molecule, vector or construct is provided comprising a transcribable DNA sequence encoding a GA2 oxidase protein that comprises or consists of a sequence that is at least 80%, at least 85%, at least 90%, at least 95%, at least 96%, at least 97%, at least 98%, at least 99%, at least 99.5%, or 100% identical to one or more of SEQ ID NOs: 2, 4, 6, 8, 10, 12, 14, 16, 18, 20, 22, 24 and/or 26, wherein the transcribable DNA sequence is operably linked to a plant-expressible promoter. According to some of these embodiments, the transcribable DNA sequence of the recombinant DNA molecule, vector or construct comprises or consists of a sequence that is at least 80%, at least 85%, at least 90%, at least 95%, at least 96%, at least 97%, at least 98%, at least 99%, at least 99.5%, or 100% identical to one or more of SEQ ID NOs: 1, 3, 5, 7, 9, 11, 13, 15, 17, 19, 21, 23 and/or 25. According to some embodiments, the plant expressible promoter is a vascular promoter. According to some embodiments, the plant expressible promoter is a vascular promoter comprising a sequence that is at least 70%, at least 75%, at least 80%, at least 85%, at least 90%, at least 95%, at least 96%, at least 97%, at least 98%, at least 99%, at least 99.5%, or 100% identical to one or more of SEQ ID NOs: 333, 334, 335, 336, 337, 338 and/or 339, or a functional portion of any of the foregoing. According to some embodiments, the plant expressible promoter is a RTBV promoter (e.g., a promoter comprising the RTBV (SEQ ID NO: 333) or truncated RTBV (SEQ ID NO: 334) sequence) or a promoter comprising a sequence that is at least 70%, at least 75%, at least 80%, at least 85%, at least 90%, at least 95%, at least 96%, at least 97%, at least 98%, at least 99%, at least 99.5%, or 100% identical to SEQ ID NO: 333 and/or 334. According to some embodiments, the plant expressible promoter is a leaf promoter. According to some embodiments, the plant expressible promoter is a leaf promoter comprising a sequence that is at least 70%, at least 75%, at least 80%, at least 85%, at least 90%, at least 95%, at least 96%, at least 97%, at least 98%, at least 99%, at least 99.5%, or 100% identical to one or more of SEQ ID NOs: 340, 341 and/or 342, or a functional portion of any of the foregoing. According to some embodiments, the plant expressible promoter is a constitutive promoter. According to some embodiments, the plant expressible promoter is a constitutive promoter comprising a sequence that is at least 70%, at least 75%, at least 80%, at least 85%, at least 90%, at least 95%, at least 96%, at least 97%, at least 98%, at least 99%, at least 99.5%, or 100% identical to one or more of SEQ ID NOs: 343, 344, 345, 346, 347, 348, 349, 350 and/or 351, or a functional portion of any of the foregoing.

[0241] According to some embodiments, a recombinant DNA molecule, vector or construct is provided comprising a transcribable DNA sequence that comprises or consists of a sequence that is at least 80%, at least 85%, at least 90%, at least 95%, at least 96%, at least 97%, at least 98%, at least 99%, at least 99.5%, or 100% identical to one or more of SEQ ID NOs: 1, 3, 5, 7, 9, 11, 13, 15, 17, 19, 21, 23 and/or 25, wherein the transcribable DNA sequence is operably linked to a plant-expressible promoter. According to some embodiments, the transcribable DNA sequence encodes a GA2 oxidase protein. According to some embodiments, the plant expressible promoter is a vascular promoter. According to some embodiments, the plant expressible promoter is a vascular promoter comprising a sequence that is at least 70%, at least 75%, at least 80%, at least 85%, at least 90%, at least 95%, at least 96%, at least 97%, at least 98%, at least 99%, at least 99.5%, or 100% identical to one or more of SEQ ID NOs: 333, 334, 335, 336, 337, 338 and/or 339, or a functional portion of any of the foregoing. According to some embodiments, the plant expressible promoter is a RTBV promoter (e.g., a promoter comprising the RTBV (SEQ ID NO: 333) or truncated RTBV (SEQ ID NO: 334) sequence) or a promoter comprising a sequence that is at least 70%, at least 75%, at least 80%, at least 85%, at least 90%, at least 95%, at least 96%, at least 97%, at least 98%, at least 99%, at least 99.5%, or 100% identical to SEQ ID NO: 333 and/or 334. According to some embodiments, the plant expressible promoter is a leaf promoter. According to some embodiments, the plant expressible promoter is a leaf promoter comprising a sequence that is at least 70%, at least 75%, at least 80%, at least 85%, at least 90%, at least 95%, at least 96%, at least 97%, at least 98%, at least 99%, at least 99.5%, or 100% identical to one or more of SEQ ID NOs: 340, 341 and/or 342, or a functional portion of any of the foregoing. According to some embodiments, the plant expressible promoter is a constitutive promoter. According to some embodiments, the plant expressible promoter is a constitutive promoter comprising a sequence that is at least 70%, at least 75%, at least 80%, at least 85%, at least 90%, at least 95%, at least 96%, at least 97%, at least 98%, at least 99%, at least 99.5%, or 100% identical to one or more of SEQ ID NOs: 343, 344, 345, 346, 347, 348, 349, 350 and/or 351, or a functional portion of any of the foregoing.

[0242] According to some embodiments, a recombinant DNA molecule, vector or construct is provided comprising a transcribable DNA sequence encoding a GA2 oxidase protein that comprises or consists of a sequence that is at least 80%, at least 85%, at least 90%, at least 95%, at least 96%, at least 97%, at least 98%, at least 99%, at least 99.5%, or 100% identical to one or more of SEQ ID NOs: 28, 30, 32, 34, 36, 38, 40, 42, 44 and/or 46, wherein the transcribable DNA sequence is operably linked to a plant-expressible promoter. According to some of these embodiments, the transcribable DNA sequence of the recombinant DNA molecule, vector or construct comprises or consists of a sequence that is at least 80%, at least 85%, at least 90%, at least 95%, at least 96%, at least 97%, at least 98%, at least 99%, at least 99.5%, or 100% identical to one or more of SEQ ID NOs: 27, 29, 31, 33, 35, 37, 39, 41, 43 and/or 45. According to some embodiments, the plant expressible promoter is a vascular promoter. According to some embodiments, the plant expressible promoter is a vascular promoter comprising a sequence that is at least 70%, at least 75%, at least 80%, at least 85%, at least 90%, at least 95%, at least 96%, at least 97%, at least 98%, at least 99%, at least 99.5%, or 100% identical to one or more of SEQ ID NOs: 333, 334, 335, 336, 337, 338 and/or 339, or a functional portion of any of the foregoing. According to some embodiments, the plant expressible promoter is a RTBV promoter (e.g., a promoter comprising the RTBV (SEQ ID NO: 333) or truncated RTBV (SEQ ID NO: 334) sequence) or a promoter comprising a sequence that is at least 70%, at least 75%, at least 80%, at least 85%, at least 90%, at least 95%, at least 96%, at least 97%, at least 98%, at least 99%, at least 99.5%, or 100% identical to SEQ ID NO: 333 and/or 334. According to some embodiments, the plant expressible promoter is a leaf promoter. According to some embodiments, the plant expressible promoter is a leaf promoter comprising a sequence that is at least 70%, at least 75%, at least 80%, at least 85%, at least 90%, at least 95%, at least 96%, at least 97%, at least 98%, at least 99%, at least 99.5%, or 100% identical to one or more of SEQ ID NOs: 340, 341 and/or 342, or a functional portion of any of the foregoing. According to some embodiments, the plant expressible promoter is a constitutive promoter. According to some embodiments, the plant expressible promoter is a constitutive promoter comprising a sequence that is at least 70%, at least 75%, at least 80%, at least 85%, at least 90%, at least 95%, at least 96%, at least 97%, at least 98%, at least 99%, at least 99.5%, or 100% identical to one or more of SEQ ID NOs: 343, 344, 345, 346, 347, 348, 349, 350 and/or 351, or a functional portion of any of the foregoing.

[0243] According to some embodiments, a recombinant DNA molecule, vector or construct is provided comprising a transcribable DNA sequence that comprises or consists of a sequence that is at least 80%, at least 85%, at least 90%, at least 95%, at least 96%, at least 97%, at least 98%, at least 99%, at least 99.5%, or 100% identical to one or more of SEQ ID NOs: 27, 29, 31, 33, 35, 37, 39, 41, 43 and/or 45, wherein the transcribable DNA sequence is operably linked to a plant-expressible promoter. According to some embodiments, the transcribable DNA sequence encodes a GA2 oxidase protein. According to some embodiments, the plant expressible promoter is a vascular promoter. According to some embodiments, the plant expressible promoter is a vascular promoter comprising a sequence that is at least 70%, at least 75%, at least 80%, at least 85%, at least 90%, at least 95%, at least 96%, at least 97%, at least 98%, at least 99%, at least 99.5%, or 100% identical to one or more of SEQ ID NOs: 333, 334, 335, 336, 337, 338 and/or 339, or a functional portion of any of the foregoing. According to some embodiments, the plant expressible promoter is a RTBV promoter (e.g., a promoter comprising the RTBV (SEQ ID NO: 333) or truncated RTBV (SEQ ID NO: 334) sequence) or a promoter comprising a sequence that is at least 70%, at least 75%, at least 80%, at least 85%, at least 90%, at least 95%, at least 96%, at least 97%, at least 98%, at least 99%, at least 99.5%, or 100% identical to SEQ ID NO: 333 and/or 334. According to some embodiments, the plant expressible promoter is a leaf promoter. According to some embodiments, the plant expressible promoter is a leaf promoter comprising a sequence that is at least 70%, at least 75%, at least 80%, at least 85%, at least 90%, at least 95%, at least 96%, at least 97%, at least 98%, at least 99%, at least 99.5%, or 100% identical to one or more of SEQ ID NOs: 340, 341 and/or 342, or a functional portion of any of the foregoing. According to some embodiments, the plant expressible promoter is a constitutive promoter. According to some embodiments, the plant expressible promoter is a constitutive promoter comprising a sequence that is at least 70%, at least 75%, at least 80%, at least 85%, at least 90%, at least 95%, at least 96%, at least 97%, at least 98%, at least 99%, at least 99.5%, or 100% identical to one or more of SEQ ID NOs: 343, 344, 345, 346, 347, 348, 349, 350 and/or 351, or a functional portion of any of the foregoing.

[0244] According to some embodiments, a recombinant DNA molecule, vector or construct is provided comprising a transcribable DNA sequence encoding a GA2 oxidase protein that comprises or consists of a sequence that is at least 80%, at least 85%, at least 90%, at least 95%, at least 96%, at least 97%, at least 98%, at least 99%, at least 99.5%, or 100% identical to one or more of SEQ ID NOs: 48, 50, 52, 54, 56, 58, 60 and/or 62, wherein the transcribable DNA sequence is operably linked to a plant-expressible promoter. According to some of these embodiments, the transcribable DNA sequence of the recombinant DNA molecule, vector or construct comprises or consists of a sequence that is at least 80%, at least 85%, at least 90%, at least 95%, at least 96%, at least 97%, at least 98%, at least 99%, at least 99.5%, or 100% identical to one or more of SEQ ID NOs: 47, 49, 51, 53, 55, 57, 59 and/or 61. According to some embodiments, the plant expressible promoter is a vascular promoter. According to some embodiments, the plant expressible promoter is a vascular promoter comprising a sequence that is at least 70%, at least 75%, at least 80%, at least 85%, at least 90%, at least 95%, at least 96%, at least 97%, at least 98%, at least 99%, at least 99.5%, or 100% identical to one or more of SEQ ID NOs: 333, 334, 335, 336, 337, 338 and/or 339, or a functional portion of any of the foregoing. According to some embodiments, the plant expressible promoter is a RTBV promoter (e.g., a promoter comprising the RTBV (SEQ ID NO: 333) or truncated RTBV (SEQ ID NO: 334) sequence) or a promoter comprising a sequence that is at least 70%, at least 75%, at least 80%, at least 85%, at least 90%, at least 95%, at least 96%, at least 97%, at least 98%, at least 99%, at least 99.5%, or 100% identical to SEQ ID NO: 333 and/or 334. According to some embodiments, the plant expressible promoter is a leaf promoter. According to some embodiments, the plant expressible promoter is a leaf promoter comprising a sequence that is at least 70%, at least 75%, at least 80%, at least 85%, at least 90%, at least 95%, at least 96%, at least 97%, at least 98%, at least 99%, at least 99.5%, or 100% identical to one or more of SEQ ID NOs: 340, 341 and/or 342, or a functional portion of any of the foregoing. According to some embodiments, the plant expressible promoter is a constitutive promoter. According to some embodiments, the plant expressible promoter is a constitutive promoter comprising a sequence that is at least 70%, at least 75%, at least 80%, at least 85%, at least 90%, at least 95%, at least 96%, at least 97%, at least 98%, at least 99%, at least 99.5%, or 100% identical to one or more of SEQ ID NOs: 343, 344, 345, 346, 347, 348, 349, 350 and/or 351, or a functional portion of any of the foregoing.

[0245] According to some embodiments, a recombinant DNA molecule, vector or construct is provided comprising a transcribable DNA sequence that comprises or consists of a sequence that is at least 80%, at least 85%, at least 90%, at least 95%, at least 96%, at least 97%, at least 98%, at least 99%, at least 99.5%, or 100% identical to one or more of SEQ ID NOs: 47, 49, 51, 53, 55, 57, 59 and/or 61, wherein the transcribable DNA sequence is operably linked to a plant-expressible promoter. According to some embodiments, the transcribable DNA sequence encodes a GA2 oxidase protein. According to some embodiments, the plant expressible promoter is a vascular promoter. According to some embodiments, the plant expressible promoter is a vascular promoter comprising a sequence that is at least 70%, at least 75%, at least 80%, at least 85%, at least 90%, at least 95%, at least 96%, at least 97%, at least 98%, at least 99%, at least 99.5%, or 100% identical to one or more of SEQ ID NOs: 333, 334, 335, 336, 337, 338 and/or 339, or a functional portion of any of the foregoing. According to some embodiments, the plant expressible promoter is a RTBV promoter (e.g., a promoter comprising the RTBV (SEQ ID NO: 333) or truncated RTBV (SEQ ID NO: 334) sequence) or a promoter comprising a sequence that is at least 70%, at least 75%, at least 80%, at least 85%, at least 90%, at least 95%, at least 96%, at least 97%, at least 98%, at least 99%, at least 99.5%, or 100% identical to SEQ ID NO: 333 and/or 334. According to some embodiments, the plant expressible promoter is a leaf promoter. According to some embodiments, the plant expressible promoter is a leaf promoter comprising a sequence that is at least 70%, at least 75%, at least 80%, at least 85%, at least 90%, at least 95%, at least 96%, at least 97%, at least 98%, at least 99%, at least 99.5%, or 100% identical to one or more of SEQ ID NOs: 340, 341 and/or 342, or a functional portion of any of the foregoing. According to some embodiments, the plant expressible promoter is a constitutive promoter. According to some embodiments, the plant expressible promoter is a constitutive promoter comprising a sequence that is at least 70%, at least 75%, at least 80%, at least 85%, at least 90%, at least 95%, at least 96%, at least 97%, at least 98%, at least 99%, at least 99.5%, or 100% identical to one or more of SEQ ID NOs: 343, 344, 345, 346, 347, 348, 349, 350 and/or 351, or a functional portion of any of the foregoing.

[0246] According to some embodiments, a recombinant DNA molecule, vector or construct is provided comprising a transcribable DNA sequence encoding a GA2 oxidase protein that comprises or consists of a sequence that is at least 80%, at least 85%, at least 90%, at least 95%, at least 96%, at least 97%, at least 98%, at least 99%, at least 99.5%, or 100% identical to one or more of SEQ ID NOs: 64, 66, 68, 70, 72, 74, 76, 78, 80, 82, 84, 86, 88, 90, 92 and/or 94, wherein the transcribable DNA sequence is operably linked to a plant-expressible promoter. According to some of these embodiments, the transcribable DNA sequence of the recombinant DNA molecule, vector or construct comprises or consists of a sequence that is at least 80%, at least 85%, at least 90%, at least 95%, at least 96%, at least 97%, at least 98%, at least 99%, at least 99.5%, or 100% identical to one or more of SEQ ID NOs: 63, 65, 67, 69, 71, 73, 75, 77, 79, 81, 83, 85, 87, 89, 91 and/or 93. According to some embodiments, the plant expressible promoter is a vascular promoter. According to some embodiments, the plant expressible promoter is a vascular promoter comprising a sequence that is at least 70%, at least 75%, at least 80%, at least 85%, at least 90%, at least 95%, at least 96%, at least 97%, at least 98%, at least 99%, at least 99.5%, or 100% identical to one or more of SEQ ID NOs: 333, 334, 335, 336, 337, 338 and/or 339, or a functional portion of any of the foregoing. According to some embodiments, the plant expressible promoter is a RTBV promoter (e.g., a promoter comprising the RTBV (SEQ ID NO: 333) or truncated RTBV (SEQ ID NO: 334) sequence) or a promoter comprising a sequence that is at least 70%, at least 75%, at least 80%, at least 85%, at least 90%, at least 95%, at least 96%, at least 97%, at least 98%, at least 99%, at least 99.5%, or 100% identical to SEQ ID NO: 333 and/or 334. According to some embodiments, the plant expressible promoter is a leaf promoter. According to some embodiments, the plant expressible promoter is a leaf promoter comprising a sequence that is at least 70%, at least 75%, at least 80%, at least 85%, at least 90%, at least 95%, at least 96%, at least 97%, at least 98%, at least 99%, at least 99.5%, or 100% identical to one or more of SEQ ID NOs: 340, 341 and/or 342, or a functional portion of any of the foregoing. According to some embodiments, the plant expressible promoter is a constitutive promoter. According to some embodiments, the plant expressible promoter is a constitutive promoter comprising a sequence that is at least 70%, at least 75%, at least 80%, at least 85%, at least 90%, at least 95%, at least 96%, at least 97%, at least 98%, at least 99%, at least 99.5%, or 100% identical to one or more of SEQ ID NOs: 343, 344, 345, 346, 347, 348, 349, 350 and/or 351, or a functional portion of any of the foregoing.

[0247] According to some embodiments, a recombinant DNA molecule, vector or construct is provided comprising a transcribable DNA sequence that comprises or consists of a sequence that is at least 80%, at least 85%, at least 90%, at least 95%, at least 96%, at least 97%, at least 98%, at least 99%, at least 99.5%, or 100% identical to one or more of SEQ ID NOs: 63, 65, 67, 69, 71, 73, 75, 77, 79, 81, 83, 85, 87, 89, 91 and/or 93, wherein the transcribable DNA sequence is operably linked to a plant-expressible promoter. According to some embodiments, the transcribable DNA sequence encodes a GA2 oxidase protein. According to some embodiments, the plant expressible promoter is a vascular promoter. According to some embodiments, the plant expressible promoter is a vascular promoter comprising a sequence that is at least 70%, at least 75%, at least 80%, at least 85%, at least 90%, at least 95%, at least 96%, at least 97%, at least 98%, at least 99%, at least 99.5%, or 100% identical to one or more of SEQ ID NOs: 333, 334, 335, 336, 337, 338 and/or 339, or a functional portion of any of the foregoing. According to some embodiments, the plant expressible promoter is a RTBV promoter (e.g., a promoter comprising the RTBV (SEQ ID NO: 333) or truncated RTBV (SEQ ID NO: 334) sequence) or a promoter comprising a sequence that is at least 70%, at least 75%, at least 80%, at least 85%, at least 90%, at least 95%, at least 96%, at least 97%, at least 98%, at least 99%, at least 99.5%, or 100% identical to SEQ ID NO: 333 and/or 334. According to some embodiments, the plant expressible promoter is a leaf promoter. According to some embodiments, the plant expressible promoter is a leaf promoter comprising a sequence that is at least 70%, at least 75%, at least 80%, at least 85%, at least 90%, at least 95%, at least 96%, at least 97%, at least 98%, at least 99%, at least 99.5%, or 100% identical to one or more of SEQ ID NOs: 340, 341 and/or 342, or a functional portion of any of the foregoing. According to some embodiments, the plant expressible promoter is a constitutive promoter. According to some embodiments, the plant expressible promoter is a constitutive promoter comprising a sequence that is at least 70%, at least 75%, at least 80%, at least 85%, at least 90%, at least 95%, at least 96%, at least 97%, at least 98%, at least 99%, at least 99.5%, or 100% identical to one or more of SEQ ID NOs: 343, 344, 345, 346, 347, 348, 349, 350 and/or 351, or a functional portion of any of the foregoing.

[0248] According to some embodiments, a recombinant DNA molecule, vector or construct is provided comprising a transcribable DNA sequence encoding a GA2 oxidase protein that comprises or consists of a sequence that is at least 80%, at least 85%, at least 90%, at least 95%, at least 96%, at least 97%, at least 98%, at least 99%, at least 99.5%, or 100% identical to one or more of SEQ ID NOs: 96, 98, 100, 102, 104, 106, 108, 110, 112, 114, 116, 118, 120, 122 and/or 124, wherein the transcribable DNA sequence is operably linked to a plant-expressible promoter. According to some of these embodiments, the transcribable DNA sequence of the recombinant DNA molecule, vector or construct comprises or consists of a sequence that is at least 80%, at least 85%, at least 90%, at least 95%, at least 96%, at least 97%, at least 98%, at least 99%, at least 99.5%, or 100% identical to one or more of SEQ ID NOs: 95, 97, 99, 101, 103, 105, 107, 109, 111, 113, 115, 117, 119, 121 and/or 123. According to some embodiments, the plant expressible promoter is a vascular promoter. According to some embodiments, the plant expressible promoter is a vascular promoter comprising a sequence that is at least 70%, at least 75%, at least 80%, at least 85%, at least 90%, at least 95%, at least 96%, at least 97%, at least 98%, at least 99%, at least 99.5%, or 100% identical to one or more of SEQ ID NOs: 333, 334, 335, 336, 337, 338 and/or 339, or a functional portion of any of the foregoing. According to some embodiments, the plant expressible promoter is a RTBV promoter (e.g., a promoter comprising the RTBV (SEQ ID NO: 333) or truncated RTBV (SEQ ID NO: 334) sequence) or a promoter comprising a sequence that is at least 70%, at least 75%, at least 80%, at least 85%, at least 90%, at least 95%, at least 96%, at least 97%, at least 98%, at least 99%, at least 99.5%, or 100% identical to SEQ ID NO: 333 and/or 334. According to some embodiments, the plant expressible promoter is a leaf promoter. According to some embodiments, the plant expressible promoter is a leaf promoter comprising a sequence that is at least 70%, at least 75%, at least 80%, at least 85%, at least 90%, at least 95%, at least 96%, at least 97%, at least 98%, at least 99%, at least 99.5%, or 100% identical to one or more of SEQ ID NOs: 340, 341 and/or 342, or a functional portion of any of the foregoing. According to some embodiments, the plant expressible promoter is a constitutive promoter. According to some embodiments, the plant expressible promoter is a constitutive promoter comprising a sequence that is at least 70%, at least 75%, at least 80%, at least 85%, at least 90%, at least 95%, at least 96%, at least 97%, at least 98%, at least 99%, at least 99.5%, or 100% identical to one or more of SEQ ID NOs: 343, 344, 345, 346, 347, 348, 349, 350 and/or 351, or a functional portion of any of the foregoing.

[0249] According to some embodiments, a recombinant DNA molecule, vector or construct is provided comprising a transcribable DNA sequence that comprises or consists of a sequence that is at least 80%, at least 85%, at least 90%, at least 95%, at least 96%, at least 97%, at least 98%, at least 99%, at least 99.5%, or 100% identical to one or more of SEQ ID NOs: 95, 97, 99, 101, 103, 105, 107, 109, 111, 113, 115, 117, 119, 121 and/or 123, wherein the transcribable DNA sequence is operably linked to a plant-expressible promoter. According to some embodiments, the transcribable DNA sequence encodes a GA2 oxidase protein. According to some embodiments, the plant expressible promoter is a vascular promoter. According to some embodiments, the plant expressible promoter is a vascular promoter comprising a sequence that is at least 70%, at least 75%, at least 80%, at least 85%, at least 90%, at least 95%, at least 96%, at least 97%, at least 98%, at least 99%, at least 99.5%, or 100% identical to one or more of SEQ ID NOs: 333, 334, 335, 336, 337, 338 and/or 339, or a functional portion of any of the foregoing. According to some embodiments, the plant expressible promoter is a RTBV promoter (e.g., a promoter comprising the RTBV (SEQ ID NO: 333) or truncated RTBV (SEQ ID NO: 334) sequence) or a promoter comprising a sequence that is at least 70%, at least 75%, at least 80%, at least 85%, at least 90%, at least 95%, at least 96%, at least 97%, at least 98%, at least 99%, at least 99.5%, or 100% identical to SEQ ID NO: 333 and/or 334. According to some embodiments, the plant expressible promoter is a leaf promoter. According to some embodiments, the plant expressible promoter is a leaf promoter comprising a sequence that is at least 70%, at least 75%, at least 80%, at least 85%, at least 90%, at least 95%, at least 96%, at least 97%, at least 98%, at least 99%, at least 99.5%, or 100% identical to one or more of SEQ ID NOs: 340, 341 and/or 342, or a functional portion of any of the foregoing. According to some embodiments, the plant expressible promoter is a constitutive promoter. According to some embodiments, the plant expressible promoter is a constitutive promoter comprising a sequence that is at least 70%, at least 75%, at least 80%, at least 85%, at least 90%, at least 95%, at least 96%, at least 97%, at least 98%, at least 99%, at least 99.5%, or 100% identical to one or more of SEQ ID NOs: 343, 344, 345, 346, 347, 348, 349, 350 and/or 351, or a functional portion of any of the foregoing.

[0250] According to some embodiments, a recombinant DNA molecule, vector or construct is provided comprising a transcribable DNA sequence encoding a GA2 oxidase protein that comprises or consists of a sequence that is at least 80%, at least 85%, at least 90%, at least 95%, at least 96%, at least 97%, at least 98%, at least 99%, at least 99.5%, or 100% identical to one or more of SEQ ID NOs: 126, 128, 130, 132, 134, 136, 138, 140, 142, 144 and/or 146, wherein the transcribable DNA sequence is operably linked to a plant-expressible promoter. According to some of these embodiments, the transcribable DNA sequence of the recombinant DNA molecule, vector or construct comprises or consists of a sequence that is at least 80%, at least 85%, at least 90%, at least 95%, at least 96%, at least 97%, at least 98%, at least 99%, at least 99.5%, or 100% identical to one or more of SEQ ID NOs: 125, 127, 129, 131, 133, 135, 137, 139, 141, 143 and/or 145. According to some embodiments, the plant expressible promoter is a vascular promoter. According to some embodiments, the plant expressible promoter is a vascular promoter comprising a sequence that is at least 70%, at least 75%, at least 80%, at least 85%, at least 90%, at least 95%, at least 96%, at least 97%, at least 98%, at least 99%, at least 99.5%, or 100% identical to one or more of SEQ ID NOs: 333, 334, 335, 336, 337, 338 and/or 339, or a functional portion of any of the foregoing. According to some embodiments, the plant expressible promoter is a RTBV promoter (e.g., a promoter comprising the RTBV (SEQ ID NO: 333) or truncated RTBV (SEQ ID NO: 334) sequence) or a promoter comprising a sequence that is at least 70%, at least 75%, at least 80%, at least 85%, at least 90%, at least 95%, at least 96%, at least 97%, at least 98%, at least 99%, at least 99.5%, or 100% identical to SEQ ID NO: 333 and/or 334. According to some embodiments, the plant expressible promoter is a leaf promoter. According to some embodiments, the plant expressible promoter is a leaf promoter comprising a sequence that is at least 70%, at least 75%, at least 80%, at least 85%, at least 90%, at least 95%, at least 96%, at least 97%, at least 98%, at least 99%, at least 99.5%, or 100% identical to one or more of SEQ ID NOs: 340, 341 and/or 342, or a functional portion of any of the foregoing. According to some embodiments, the plant expressible promoter is a constitutive promoter. According to some embodiments, the plant expressible promoter is a constitutive promoter comprising a sequence that is at least 70%, at least 75%, at least 80%, at least 85%, at least 90%, at least 95%, at least 96%, at least 97%, at least 98%, at least 99%, at least 99.5%, or 100% identical to one or more of SEQ ID NOs: 343, 344, 345, 346, 347, 348, 349, 350 and/or 351, or a functional portion of any of the foregoing.

[0251] According to some embodiments, a recombinant DNA molecule, vector or construct is provided comprising a transcribable DNA sequence that comprises or consists of a sequence that is at least 80%, at least 85%, at least 90%, at least 95%, at least 96%, at least 97%, at least 98%, at least 99%, at least 99.5%, or 100% identical to one or more of SEQ ID NOs: 125, 127, 129, 131, 133, 135, 137, 139, 141, 143 and/or 145, wherein the transcribable DNA sequence is operably linked to a plant-expressible promoter. According to some embodiments, the transcribable DNA sequence encodes a GA2 oxidase protein. According to some embodiments, the plant expressible promoter is a vascular promoter. According to some embodiments, the plant expressible promoter is a vascular promoter comprising a sequence that is at least 70%, at least 75%, at least 80%, at least 85%, at least 90%, at least 95%, at least 96%, at least 97%, at least 98%, at least 99%, at least 99.5%, or 100% identical to one or more of SEQ ID NOs: 333, 334, 335, 336, 337, 338 and/or 339, or a functional portion of any of the foregoing. According to some embodiments, the plant expressible promoter is a RTBV promoter (e.g., a promoter comprising the RTBV (SEQ ID NO: 333) or truncated RTBV (SEQ ID NO: 334) sequence) or a promoter comprising a sequence that is at least 70%, at least 75%, at least 80%, at least 85%, at least 90%, at least 95%, at least 96%, at least 97%, at least 98%, at least 99%, at least 99.5%, or 100% identical to SEQ ID NO: 333 and/or 334. According to some embodiments, the plant expressible promoter is a leaf promoter. According to some embodiments, the plant expressible promoter is a leaf promoter comprising a sequence that is at least 70%, at least 75%, at least 80%, at least 85%, at least 90%, at least 95%, at least 96%, at least 97%, at least 98%, at least 99%, at least 99.5%, or 100% identical to one or more of SEQ ID NOs: 340, 341 and/or 342, or a functional portion of any of the foregoing. According to some embodiments, the plant expressible promoter is a constitutive promoter. According to some embodiments, the plant expressible promoter is a constitutive promoter comprising a sequence that is at least 70%, at least 75%, at least 80%, at least 85%, at least 90%, at least 95%, at least 96%, at least 97%, at least 98%, at least 99%, at least 99.5%, or 100% identical to one or more of SEQ ID NOs: 343, 344, 345, 346, 347, 348, 349, 350 and/or 351, or a functional portion of any of the foregoing.

[0252] According to some embodiments, a recombinant DNA molecule, vector or construct is provided comprising a transcribable DNA sequence encoding a GA2 oxidase protein that comprises or consists of a sequence that is at least 80%, at least 85%, at least 90%, at least 95%, at least 96%, at least 97%, at least 98%, at least 99%, at least 99.5%, or 100% identical to one or more of SEQ ID NOs: 148, 150, 152, 154, 156, 158, 160, 162, 164, 166, 168, 170, 172, 174, 176 and/or 178, wherein the transcribable DNA sequence is operably linked to a plant-expressible promoter. According to some of these embodiments, the transcribable DNA sequence of the recombinant DNA molecule, vector or construct comprises or consists of a sequence that is at least 80%, at least 85%, at least 90%, at least 95%, at least 96%, at least 97%, at least 98%, at least 99%, at least 99.5%, or 100% identical to one or more of SEQ ID NOs: 147, 149, 151, 153, 155, 157, 159, 161, 163, 165, 167, 169, 171, 173, 175 and/or 177. According to some embodiments, the plant expressible promoter is a vascular promoter. According to some embodiments, the plant expressible promoter is a vascular promoter comprising a sequence that is at least 70%, at least 75%, at least 80%, at least 85%, at least 90%, at least 95%, at least 96%, at least 97%, at least 98%, at least 99%, at least 99.5%, or 100% identical to one or more of SEQ ID NOs: 333, 334, 335, 336, 337, 338 and/or 339, or a functional portion of any of the foregoing. According to some embodiments, the plant expressible promoter is a RTBV promoter (e.g., a promoter comprising the RTBV (SEQ ID NO: 333) or truncated RTBV (SEQ ID NO: 334) sequence) or a promoter comprising a sequence that is at least 70%, at least 75%, at least 80%, at least 85%, at least 90%, at least 95%, at least 96%, at least 97%, at least 98%, at least 99%, at least 99.5%, or 100% identical to SEQ ID NO: 333 and/or 334. According to some embodiments, the plant expressible promoter is a leaf promoter. According to some embodiments, the plant expressible promoter is a leaf promoter comprising a sequence that is at least 70%, at least 75%, at least 80%, at least 85%, at least 90%, at least 95%, at least 96%, at least 97%, at least 98%, at least 99%, at least 99.5%, or 100% identical to one or more of SEQ ID NOs: 340, 341 and/or 342, or a functional portion of any of the foregoing. According to some embodiments, the plant expressible promoter is a constitutive promoter. According to some embodiments, the plant expressible promoter is a constitutive promoter comprising a sequence that is at least 70%, at least 75%, at least 80%, at least 85%, at least 90%, at least 95%, at least 96%, at least 97%, at least 98%, at least 99%, at least 99.5%, or 100% identical to one or more of SEQ ID NOs: 343, 344, 345, 346, 347, 348, 349, 350 and/or 351, or a functional portion of any of the foregoing.

[0253] According to some embodiments, a recombinant DNA molecule, vector or construct is provided comprising a transcribable DNA sequence that comprises or consists of a sequence that is at least 80%, at least 85%, at least 90%, at least 95%, at least 96%, at least 97%, at least 98%, at least 99%, at least 99.5%, or 100% identical to one or more of SEQ ID NOs: 147, 149, 151, 153, 155, 157, 159, 161, 163, 165, 167, 169, 171, 173, 175 and/or 177, wherein the transcribable DNA sequence is operably linked to a plant-expressible promoter. According to some embodiments, the transcribable DNA sequence encodes a GA2 oxidase protein. According to some embodiments, the plant expressible promoter is a vascular promoter. According to some embodiments, the plant expressible promoter is a vascular promoter comprising a sequence that is at least 70%, at least 75%, at least 80%, at least 85%, at least 90%, at least 95%, at least 96%, at least 97%, at least 98%, at least 99%, at least 99.5%, or 100% identical to one or more of SEQ ID NOs: 333, 334, 335, 336, 337, 338 and/or 339, or a functional portion of any of the foregoing. According to some embodiments, the plant expressible promoter is a RTBV promoter (e.g., a promoter comprising the RTBV (SEQ ID NO: 333) or truncated RTBV (SEQ ID NO: 334) sequence) or a promoter comprising a sequence that is at least 70%, at least 75%, at least 80%, at least 85%, at least 90%, at least 95%, at least 96%, at least 97%, at least 98%, at least 99%, at least 99.5%, or 100% identical to SEQ ID NO: 333 and/or 334. According to some embodiments, the plant expressible promoter is a leaf promoter. According to some embodiments, the plant expressible promoter is a leaf promoter comprising a sequence that is at least 70%, at least 75%, at least 80%, at least 85%, at least 90%, at least 95%, at least 96%, at least 97%, at least 98%, at least 99%, at least 99.5%, or 100% identical to one or more of SEQ ID NOs: 340, 341 and/or 342, or a functional portion of any of the foregoing. According to some embodiments, the plant expressible promoter is a constitutive promoter. According to some embodiments, the plant expressible promoter is a constitutive promoter comprising a sequence that is at least 70%, at least 75%, at least 80%, at least 85%, at least 90%, at least 95%, at least 96%, at least 97%, at least 98%, at least 99%, at least 99.5%, or 100% identical to one or more of SEQ ID NOs: 343, 344, 345, 346, 347, 348, 349, 350 and/or 351, or a functional portion of any of the foregoing.

[0254] According to some embodiments, a recombinant DNA molecule, vector or construct is provided comprising a transcribable DNA sequence encoding a GA2 oxidase protein that comprises or consists of a sequence that is at least 80%, at least 85%, at least 90%, at least 95%, at least 96%, at least 97%, at least 98%, at least 99%, at least 99.5%, or 100% identical to one or more of SEQ ID NOs: 180, 182, 184, 186, 188, 190, 192, 194, 196, 198, 200, 202, 204, 206 and/or 208, wherein the transcribable DNA sequence is operably linked to a plant-expressible promoter. According to some of these embodiments, the transcribable DNA sequence of the recombinant DNA molecule, vector or construct comprises or consists of a sequence that is at least 80%, at least 85%, at least 90%, at least 95%, at least 96%, at least 97%, at least 98%, at least 99%, at least 99.5%, or 100% identical to one or more of SEQ ID NOs: 179, 181, 183, 185, 187, 189, 191, 193, 195, 197, 199, 201, 203, 205 and/or 207. According to some embodiments, the plant expressible promoter is a vascular promoter. According to some embodiments, the plant expressible promoter is a vascular promoter comprising a sequence that is at least 70%, at least 75%, at least 80%, at least 85%, at least 90%, at least 95%, at least 96%, at least 97%, at least 98%, at least 99%, at least 99.5%, or 100% identical to one or more of SEQ ID NOs: 333, 334, 335, 336, 337, 338 and/or 339, or a functional portion of any of the foregoing. According to some embodiments, the plant expressible promoter is a RTBV promoter (e.g., a promoter comprising the RTBV (SEQ ID NO: 333) or truncated RTBV (SEQ ID NO: 334) sequence) or a promoter comprising a sequence that is at least 70%, at least 75%, at least 80%, at least 85%, at least 90%, at least 95%, at least 96%, at least 97%, at least 98%, at least 99%, at least 99.5%, or 100% identical to SEQ ID NO: 333 and/or 334. According to some embodiments, the plant expressible promoter is a leaf promoter. According to some embodiments, the plant expressible promoter is a leaf promoter comprising a sequence that is at least 70%, at least 75%, at least 80%, at least 85%, at least 90%, at least 95%, at least 96%, at least 97%, at least 98%, at least 99%, at least 99.5%, or 100% identical to one or more of SEQ ID NOs: 340, 341 and/or 342, or a functional portion of any of the foregoing. According to some embodiments, the plant expressible promoter is a constitutive promoter. According to some embodiments, the plant expressible promoter is a constitutive promoter comprising a sequence that is at least 70%, at least 75%, at least 80%, at least 85%, at least 90%, at least 95%, at least 96%, at least 97%, at least 98%, at least 99%, at least 99.5%, or 100% identical to one or more of SEQ ID NOs: 343, 344, 345, 346, 347, 348, 349, 350 and/or 351, or a functional portion of any of the foregoing.

[0255] According to some embodiments, a recombinant DNA molecule, vector or construct is provided comprising a transcribable DNA sequence that comprises or consists of a sequence that is at least 80%, at least 85%, at least 90%, at least 95%, at least 96%, at least 97%, at least 98%, at least 99%, at least 99.5%, or 100% identical to one or more of SEQ ID NOs: 179, 181, 183, 185, 187, 189, 191, 193, 195, 197, 199, 201, 203, 205 and/or 207, wherein the transcribable DNA sequence is operably linked to a plant-expressible promoter. According to some embodiments, the transcribable DNA sequence encodes a GA2 oxidase protein. According to some embodiments, the plant expressible promoter is a vascular promoter. According to some embodiments, the plant expressible promoter is a vascular promoter comprising a sequence that is at least 70%, at least 75%, at least 80%, at least 85%, at least 90%, at least 95%, at least 96%, at least 97%, at least 98%, at least 99%, at least 99.5%, or 100% identical to one or more of SEQ ID NOs: 333, 334, 335, 336, 337, 338 and/or 339, or a functional portion of any of the foregoing. According to some embodiments, the plant expressible promoter is a RTBV promoter (e.g., a promoter comprising the RTBV (SEQ ID NO: 333) or truncated RTBV (SEQ ID NO: 334) sequence) or a promoter comprising a sequence that is at least 70%, at least 75%, at least 80%, at least 85%, at least 90%, at least 95%, at least 96%, at least 97%, at least 98%, at least 99%, at least 99.5%, or 100% identical to SEQ ID NO: 333 and/or 334. According to some embodiments, the plant expressible promoter is a leaf promoter. According to some embodiments, the plant expressible promoter is a leaf promoter comprising a sequence that is at least 70%, at least 75%, at least 80%, at least 85%, at least 90%, at least 95%, at least 96%, at least 97%, at least 98%, at least 99%, at least 99.5%, or 100% identical to one or more of SEQ ID NOs: 340, 341 and/or 342, or a functional portion of any of the foregoing. According to some embodiments, the plant expressible promoter is a constitutive promoter. According to some embodiments, the plant expressible promoter is a constitutive promoter comprising a sequence that is at least 70%, at least 75%, at least 80%, at least 85%, at least 90%, at least 95%, at least 96%, at least 97%, at least 98%, at least 99%, at least 99.5%, or 100% identical to one or more of SEQ ID NOs: 343, 344, 345, 346, 347, 348, 349, 350 and/or 351, or a functional portion of any of the foregoing.

[0256] According to some embodiments, a recombinant DNA molecule, vector or construct is provided comprising a transcribable DNA sequence encoding a GA2 oxidase protein that comprises or consists of a sequence that is at least 80%, at least 85%, at least 90%, at least 95%, at least 96%, at least 97%, at least 98%, at least 99%, at least 99.5%, or 100% identical to one or more of SEQ ID NOs: 210, 212, 214, 216, 218, 220, 222, 224, 226, 228, 230, 232, 234, 236 and/or 238, wherein the transcribable DNA sequence is operably linked to a plant-expressible promoter. According to some of these embodiments, the transcribable DNA sequence of the recombinant DNA molecule, vector or construct comprises or consists of a sequence that is at least 80%, at least 85%, at least 90%, at least 95%, at least 96%, at least 97%, at least 98%, at least 99%, at least 99.5%, or 100% identical to one or more of SEQ ID NOs: 209, 211, 213, 215, 217, 219, 221, 223, 225, 227, 229, 231, 233, 235 and/or 237. According to some embodiments, the plant expressible promoter is a vascular promoter. According to some embodiments, the plant expressible promoter is a vascular promoter comprising a sequence that is at least 70%, at least 75%, at least 80%, at least 85%, at least 90%, at least 95%, at least 96%, at least 97%, at least 98%, at least 99%, at least 99.5%, or 100% identical to one or more of SEQ ID NOs: 333, 334, 335, 336, 337, 338 and/or 339, or a functional portion of any of the foregoing. According to some embodiments, the plant expressible promoter is a RTBV promoter (e.g., a promoter comprising the RTBV (SEQ ID NO: 333) or truncated RTBV (SEQ ID NO: 334) sequence) or a promoter comprising a sequence that is at least 70%, at least 75%, at least 80%, at least 85%, at least 90%, at least 95%, at least 96%, at least 97%, at least 98%, at least 99%, at least 99.5%, or 100% identical to SEQ ID NO: 333 and/or 334. According to some embodiments, the plant expressible promoter is a leaf promoter. According to some embodiments, the plant expressible promoter is a leaf promoter comprising a sequence that is at least 70%, at least 75%, at least 80%, at least 85%, at least 90%, at least 95%, at least 96%, at least 97%, at least 98%, at least 99%, at least 99.5%, or 100% identical to one or more of SEQ ID NOs: 340, 341 and/or 342, or a functional portion of any of the foregoing. According to some embodiments, the plant expressible promoter is a constitutive promoter. According to some embodiments, the plant expressible promoter is a constitutive promoter comprising a sequence that is at least 70%, at least 75%, at least 80%, at least 85%, at least 90%, at least 95%, at least 96%, at least 97%, at least 98%, at least 99%, at least 99.5%, or 100% identical to one or more of SEQ ID NOs: 343, 344, 345, 346, 347, 348, 349, 350 and/or 351, or a functional portion of any of the foregoing.

[0257] According to some embodiments, a recombinant DNA molecule, vector or construct is provided comprising a transcribable DNA sequence that comprises or consists of a sequence that is at least 80%, at least 85%, at least 90%, at least 95%, at least 96%, at least 97%, at least 98%, at least 99%, at least 99.5%, or 100% identical to one or more of SEQ ID NOs: 209, 211, 213, 215, 217, 219, 221, 223, 225, 227, 229, 231, 233, 235 and/or 237, wherein the transcribable DNA sequence is operably linked to a plant-expressible promoter. According to some embodiments, the transcribable DNA sequence encodes a GA2 oxidase protein. According to some embodiments, the plant expressible promoter is a vascular promoter. According to some embodiments, the plant expressible promoter is a vascular promoter comprising a sequence that is at least 70%, at least 75%, at least 80%, at least 85%, at least 90%, at least 95%, at least 96%, at least 97%, at least 98%, at least 99%, at least 99.5%, or 100% identical to one or more of SEQ ID NOs: 333, 334, 335, 336, 337, 338 and/or 339, or a functional portion of any of the foregoing. According to some embodiments, the plant expressible promoter is a RTBV promoter (e.g., a promoter comprising the RTBV (SEQ ID NO: 333) or truncated RTBV (SEQ ID NO: 334) sequence) or a promoter comprising a sequence that is at least 70%, at least 75%, at least 80%, at least 85%, at least 90%, at least 95%, at least 96%, at least 97%, at least 98%, at least 99%, at least 99.5%, or 100% identical to SEQ ID NO: 333 and/or 334. According to some embodiments, the plant expressible promoter is a leaf promoter. According to some embodiments, the plant expressible promoter is a leaf promoter comprising a sequence that is at least 70%, at least 75%, at least 80%, at least 85%, at least 90%, at least 95%, at least 96%, at least 97%, at least 98%, at least 99%, at least 99.5%, or 100% identical to one or more of SEQ ID NOs: 340, 341 and/or 342, or a functional portion of any of the foregoing. According to some embodiments, the plant expressible promoter is a constitutive promoter. According to some embodiments, the plant expressible promoter is a constitutive promoter comprising a sequence that is at least 70%, at least 75%, at least 80%, at least 85%, at least 90%, at least 95%, at least 96%, at least 97%, at least 98%, at least 99%, at least 99.5%, or 100% identical to one or more of SEQ ID NOs: 343, 344, 345, 346, 347, 348, 349, 350 and/or 351, or a functional portion of any of the foregoing.

[0258] According to some embodiments, a recombinant DNA molecule, vector or construct is provided comprising a transcribable DNA sequence encoding a GA2 oxidase protein that comprises or consists of a sequence that is at least 80%, at least 85%, at least 90%, at least 95%, at least 96%, at least 97%, at least 98%, at least 99%, at least 99.5%, or 100% identical to one or more of SEQ ID NOs: 240, 242, 244, 246, 248, 250 and/or 252, wherein the transcribable DNA sequence is operably linked to a plant-expressible promoter. According to some of these embodiments, the transcribable DNA sequence of the recombinant DNA molecule, vector or construct comprises or consists of a sequence that is at least 80%, at least 85%, at least 90%, at least 95%, at least 96%, at least 97%, at least 98%, at least 99%, at least 99.5%, or 100% identical to one or more of SEQ ID NOs: 239, 241, 243, 245, 247, 249 and/or 251. According to some embodiments, the plant expressible promoter is a vascular promoter. According to some embodiments, the plant expressible promoter is a vascular promoter comprising a sequence that is at least 70%, at least 75%, at least 80%, at least 85%, at least 90%, at least 95%, at least 96%, at least 97%, at least 98%, at least 99%, at least 99.5%, or 100% identical to one or more of SEQ ID NOs: 333, 334, 335, 336, 337, 338 and/or 339, or a functional portion of any of the foregoing. According to some embodiments, the plant expressible promoter is a RTBV promoter (e.g., a promoter comprising the RTBV (SEQ ID NO: 333) or truncated RTBV (SEQ ID NO: 334) sequence) or a promoter comprising a sequence that is at least 70%, at least 75%, at least 80%, at least 85%, at least 90%, at least 95%, at least 96%, at least 97%, at least 98%, at least 99%, at least 99.5%, or 100% identical to SEQ ID NO: 333 and/or 334. According to some embodiments, the plant expressible promoter is a leaf promoter. According to some embodiments, the plant expressible promoter is a leaf promoter comprising a sequence that is at least 70%, at least 75%, at least 80%, at least 85%, at least 90%, at least 95%, at least 96%, at least 97%, at least 98%, at least 99%, at least 99.5%, or 100% identical to one or more of SEQ ID NOs: 340, 341 and/or 342, or a functional portion of any of the foregoing. According to some embodiments, the plant expressible promoter is a constitutive promoter. According to some embodiments, the plant expressible promoter is a constitutive promoter comprising a sequence that is at least 70%, at least 75%, at least 80%, at least 85%, at least 90%, at least 95%, at least 96%, at least 97%, at least 98%, at least 99%, at least 99.5%, or 100% identical to one or more of SEQ ID NOs: 343, 344, 345, 346, 347, 348, 349, 350 and/or 351, or a functional portion of any of the foregoing.

[0259] According to some embodiments, a recombinant DNA molecule, vector or construct is provided comprising a transcribable DNA sequence that comprises or consists of a sequence that is at least 80%, at least 85%, at least 90%, at least 95%, at least 96%, at least 97%, at least 98%, at least 99%, at least 99.5%, or 100% identical to one or more of SEQ ID NOs: 239, 241, 243, 245, 247, 249 and/or 251, wherein the transcribable DNA sequence is operably linked to a plant-expressible promoter. According to some embodiments, the transcribable DNA sequence encodes a GA2 oxidase protein. According to some embodiments, the plant expressible promoter is a vascular promoter. According to some embodiments, the plant expressible promoter is a vascular promoter comprising a sequence that is at least 70%, at least 75%, at least 80%, at least 85%, at least 90%, at least 95%, at least 96%, at least 97%, at least 98%, at least 99%, at least 99.5%, or 100% identical to one or more of SEQ ID NOs: 333, 334, 335, 336, 337, 338 and/or 339, or a functional portion of any of the foregoing. According to some embodiments, the plant expressible promoter is a RTBV promoter (e.g., a promoter comprising the RTBV (SEQ ID NO: 333) or truncated RTBV (SEQ ID NO: 334) sequence) or a promoter comprising a sequence that is at least 70%, at least 75%, at least 80%, at least 85%, at least 90%, at least 95%, at least 96%, at least 97%, at least 98%, at least 99%, at least 99.5%, or 100% identical to SEQ ID NO: 333 and/or 334. According to some embodiments, the plant expressible promoter is a leaf promoter. According to some embodiments, the plant expressible promoter is a leaf promoter comprising a sequence that is at least 70%, at least 75%, at least 80%, at least 85%, at least 90%, at least 95%, at least 96%, at least 97%, at least 98%, at least 99%, at least 99.5%, or 100% identical to one or more of SEQ ID NOs: 340, 341 and/or 342, or a functional portion of any of the foregoing. According to some embodiments, the plant expressible promoter is a constitutive promoter. According to some embodiments, the plant expressible promoter is a constitutive promoter comprising a sequence that is at least 70%, at least 75%, at least 80%, at least 85%, at least 90%, at least 95%, at least 96%, at least 97%, at least 98%, at least 99%, at least 99.5%, or 100% identical to one or more of SEQ ID NOs: 343, 344, 345, 346, 347, 348, 349, 350 and/or 351, or a functional portion of any of the foregoing.

[0260] According to some embodiments, a recombinant DNA molecule, vector or construct is provided comprising a transcribable DNA sequence encoding a GA2 oxidase protein that comprises or consists of a sequence that is at least 80%, at least 85%, at least 90%, at least 95%, at least 96%, at least 97%, at least 98%, at least 99%, at least 99.5%, or 100% identical to one or more of SEQ ID NOs: 254, 256, 258, 260, 262, 264 and/or 266, wherein the transcribable DNA sequence is operably linked to a plant-expressible promoter. According to some of these embodiments, the transcribable DNA sequence of the recombinant DNA molecule, vector or construct comprises or consists of a sequence that is at least 80%, at least 85%, at least 90%, at least 95%, at least 96%, at least 97%, at least 98%, at least 99%, at least 99.5%, or 100% identical to one or more of SEQ ID NOs: 253, 255, 257, 259, 261, 263 and/or 265. According to some embodiments, the plant expressible promoter is a vascular promoter. According to some embodiments, the plant expressible promoter is a vascular promoter comprising a sequence that is at least 70%, at least 75%, at least 80%, at least 85%, at least 90%, at least 95%, at least 96%, at least 97%, at least 98%, at least 99%, at least 99.5%, or 100% identical to one or more of SEQ ID NOs: 333, 334, 335, 336, 337, 338 and/or 339, or a functional portion of any of the foregoing. According to some embodiments, the plant expressible promoter is a RTBV promoter (e.g., a promoter comprising the RTBV (SEQ ID NO: 333) or truncated RTBV (SEQ ID NO: 334) sequence) or a promoter comprising a sequence that is at least 70%, at least 75%, at least 80%, at least 85%, at least 90%, at least 95%, at least 96%, at least 97%, at least 98%, at least 99%, at least 99.5%, or 100% identical to SEQ ID NO: 333 and/or 334. According to some embodiments, the plant expressible promoter is a leaf promoter. According to some embodiments, the plant expressible promoter is a leaf promoter comprising a sequence that is at least 70%, at least 75%, at least 80%, at least 85%, at least 90%, at least 95%, at least 96%, at least 97%, at least 98%, at least 99%, at least 99.5%, or 100% identical to one or more of SEQ ID NOs: 340, 341 and/or 342, or a functional portion of any of the foregoing. According to some embodiments, the plant expressible promoter is a constitutive promoter. According to some embodiments, the plant expressible promoter is a constitutive promoter comprising a sequence that is at least 70%, at least 75%, at least 80%, at least 85%, at least 90%, at least 95%, at least 96%, at least 97%, at least 98%, at least 99%, at least 99.5%, or 100% identical to one or more of SEQ ID NOs: 343, 344, 345, 346, 347, 348, 349, 350 and/or 351, or a functional portion of any of the foregoing.

[0261] According to some embodiments, a recombinant DNA molecule, vector or construct is provided comprising a transcribable DNA sequence that comprises or consists of a sequence that is at least 80%, at least 85%, at least 90%, at least 95%, at least 96%, at least 97%, at least 98%, at least 99%, at least 99.5%, or 100% identical to one or more of SEQ ID NOs: 253, 255, 257, 259, 261, 263 and/or 265, wherein the transcribable DNA sequence is operably linked to a plant-expressible promoter. According to some embodiments, the transcribable DNA sequence encodes a GA2 oxidase protein. According to some embodiments, the plant expressible promoter is a vascular promoter. According to some embodiments, the plant expressible promoter is a vascular promoter comprising a sequence that is at least 70%, at least 75%, at least 80%, at least 85%, at least 90%, at least 95%, at least 96%, at least 97%, at least 98%, at least 99%, at least 99.5%, or 100% identical to one or more of SEQ ID NOs: 333, 334, 335, 336, 337, 338 and/or 339, or a functional portion of any of the foregoing. According to some embodiments, the plant expressible promoter is a RTBV promoter (e.g., a promoter comprising the RTBV (SEQ ID NO: 333) or truncated RTBV (SEQ ID NO: 334) sequence) or a promoter comprising a sequence that is at least 70%, at least 75%, at least 80%, at least 85%, at least 90%, at least 95%, at least 96%, at least 97%, at least 98%, at least 99%, at least 99.5%, or 100% identical to SEQ ID NO: 333 and/or 334. According to some embodiments, the plant expressible promoter is a leaf promoter. According to some embodiments, the plant expressible promoter is a leaf promoter comprising a sequence that is at least 70%, at least 75%, at least 80%, at least 85%, at least 90%, at least 95%, at least 96%, at least 97%, at least 98%, at least 99%, at least 99.5%, or 100% identical to one or more of SEQ ID NOs: 340, 341 and/or 342, or a functional portion of any of the foregoing. According to some embodiments, the plant expressible promoter is a constitutive promoter. According to some embodiments, the plant expressible promoter is a constitutive promoter comprising a sequence that is at least 70%, at least 75%, at least 80%, at least 85%, at least 90%, at least 95%, at least 96%, at least 97%, at least 98%, at least 99%, at least 99.5%, or 100% identical to one or more of SEQ ID NOs: 343, 344, 345, 346, 347, 348, 349, 350 and/or 351, or a functional portion of any of the foregoing.

[0262] According to some embodiments, a recombinant DNA molecule, vector or construct is provided comprising a transcribable DNA sequence encoding a GA2 oxidase protein that comprises or consists of a sequence that is at least 80%, at least 85%, at least 90%, at least 95%, at least 96%, at least 97%, at least 98%, at least 99%, at least 99.5%, or 100% identical to one or more of SEQ ID NOs: 268, 270, 272, 274, 276, 278, 280, 282 and/or 284, wherein the transcribable DNA sequence is operably linked to a plant-expressible promoter. According to some of these embodiments, the transcribable DNA sequence of the recombinant DNA molecule, vector or construct comprises or consists of a sequence that is at least 80%, at least 85%, at least 90%, at least 95%, at least 96%, at least 97%, at least 98%, at least 99%, at least 99.5%, or 100% identical to one or more of SEQ ID NOs: 267, 269, 271, 273, 275, 277, 279, 281 and/or 283. According to some embodiments, the plant expressible promoter is a vascular promoter. According to some embodiments, the plant expressible promoter is a vascular promoter comprising a sequence that is at least 70%, at least 75%, at least 80%, at least 85%, at least 90%, at least 95%, at least 96%, at least 97%, at least 98%, at least 99%, at least 99.5%, or 100% identical to one or more of SEQ ID NOs: 333, 334, 335, 336, 337, 338 and/or 339, or a functional portion of any of the foregoing. According to some embodiments, the plant expressible promoter is a RTBV promoter (e.g., a promoter comprising the RTBV (SEQ ID NO: 333) or truncated RTBV (SEQ ID NO: 334) sequence) or a promoter comprising a sequence that is at least 70%, at least 75%, at least 80%, at least 85%, at least 90%, at least 95%, at least 96%, at least 97%, at least 98%, at least 99%, at least 99.5%, or 100% identical to SEQ ID NO: 333 and/or 334. According to some embodiments, the plant expressible promoter is a leaf promoter. According to some embodiments, the plant expressible promoter is a leaf promoter comprising a sequence that is at least 70%, at least 75%, at least 80%, at least 85%, at least 90%, at least 95%, at least 96%, at least 97%, at least 98%, at least 99%, at least 99.5%, or 100% identical to one or more of SEQ ID NOs: 340, 341 and/or 342, or a functional portion of any of the foregoing. According to some embodiments, the plant expressible promoter is a constitutive promoter. According to some embodiments, the plant expressible promoter is a constitutive promoter comprising a sequence that is at least 70%, at least 75%, at least 80%, at least 85%, at least 90%, at least 95%, at least 96%, at least 97%, at least 98%, at least 99%, at least 99.5%, or 100% identical to one or more of SEQ ID NOs: 343, 344, 345, 346, 347, 348, 349, 350 and/or 351, or a functional portion of any of the foregoing.

[0263] According to some embodiments, a recombinant DNA molecule, vector or construct is provided comprising a transcribable DNA sequence that comprises or consists of a sequence that is at least 80%, at least 85%, at least 90%, at least 95%, at least 96%, at least 97%, at least 98%, at least 99%, at least 99.5%, or 100% identical to one or more of SEQ ID NOs: 267, 269, 271, 273, 275, 277, 279, 281 and/or 283, wherein the transcribable DNA sequence is operably linked to a plant-expressible promoter. According to some embodiments, the transcribable DNA sequence encodes a GA2 oxidase protein. According to some embodiments, the plant expressible promoter is a vascular promoter. According to some embodiments, the plant expressible promoter is a vascular promoter comprising a sequence that is at least 70%, at least 75%, at least 80%, at least 85%, at least 90%, at least 95%, at least 96%, at least 97%, at least 98%, at least 99%, at least 99.5%, or 100% identical to one or more of SEQ ID NOs: 333, 334, 335, 336, 337, 338 and/or 339, or a functional portion of any of the foregoing. According to some embodiments, the plant expressible promoter is a RTBV promoter (e.g., a promoter comprising the RTBV (SEQ ID NO: 333) or truncated RTBV (SEQ ID NO: 334) sequence) or a promoter comprising a sequence that is at least 70%, at least 75%, at least 80%, at least 85%, at least 90%, at least 95%, at least 96%, at least 97%, at least 98%, at least 99%, at least 99.5%, or 100% identical to SEQ ID NO: 333 and/or 334. According to some embodiments, the plant expressible promoter is a leaf promoter. According to some embodiments, the plant expressible promoter is a leaf promoter comprising a sequence that is at least 70%, at least 75%, at least 80%, at least 85%, at least 90%, at least 95%, at least 96%, at least 97%, at least 98%, at least 99%, at least 99.5%, or 100% identical to one or more of SEQ ID NOs: 340, 341 and/or 342, or a functional portion of any of the foregoing. According to some embodiments, the plant expressible promoter is a constitutive promoter. According to some embodiments, the plant expressible promoter is a constitutive promoter comprising a sequence that is at least 70%, at least 75%, at least 80%, at least 85%, at least 90%, at least 95%, at least 96%, at least 97%, at least 98%, at least 99%, at least 99.5%, or 100% identical to one or more of SEQ ID NOs: 343, 344, 345, 346, 347, 348, 349, 350 and/or 351, or a functional portion of any of the foregoing.

[0264] According to some embodiments, a recombinant DNA molecule, vector or construct is provided comprising a transcribable DNA sequence encoding a GA2 oxidase protein that comprises or consists of a sequence that is at least 80%, at least 85%, at least 90%, at least 95%, at least 96%, at least 97%, at least 98%, at least 99%, at least 99.5%, or 100% identical to one or more of SEQ ID NOs: 286, 288, 290 and/or 292, wherein the transcribable DNA sequence is operably linked to a plant-expressible promoter. According to some of these embodiments, the transcribable DNA sequence of the recombinant DNA molecule, vector or construct comprises or consists of a sequence that is at least 80%, at least 85%, at least 90%, at least 95%, at least 96%, at least 97%, at least 98%, at least 99%, at least 99.5%, or 100% identical to one or more of SEQ ID NOs: 285, 287, 289 and/or 291. According to some embodiments, the plant expressible promoter is a vascular promoter. According to some embodiments, the plant expressible promoter is a vascular promoter comprising a sequence that is at least 70%, at least 75%, at least 80%, at least 85%, at least 90%, at least 95%, at least 96%, at least 97%, at least 98%, at least 99%, at least 99.5%, or 100% identical to one or more of SEQ ID NOs: 333, 334, 335, 336, 337, 338 and/or 339, or a functional portion of any of the foregoing. According to some embodiments, the plant expressible promoter is a RTBV promoter (e.g., a promoter comprising the RTBV (SEQ ID NO: 333) or truncated RTBV (SEQ ID NO: 334) sequence) or a promoter comprising a sequence that is at least 70%, at least 75%, at least 80%, at least 85%, at least 90%, at least 95%, at least 96%, at least 97%, at least 98%, at least 99%, at least 99.5%, or 100% identical to SEQ ID NO: 333 and/or 334. According to some embodiments, the plant expressible promoter is a leaf promoter. According to some embodiments, the plant expressible promoter is a leaf promoter comprising a sequence that is at least 70%, at least 75%, at least 80%, at least 85%, at least 90%, at least 95%, at least 96%, at least 97%, at least 98%, at least 99%, at least 99.5%, or 100% identical to one or more of SEQ ID NOs: 340, 341 and/or 342, or a functional portion of any of the foregoing. According to some embodiments, the plant expressible promoter is a constitutive promoter. According to some embodiments, the plant expressible promoter is a constitutive promoter comprising a sequence that is at least 70%, at least 75%, at least 80%, at least 85%, at least 90%, at least 95%, at least 96%, at least 97%, at least 98%, at least 99%, at least 99.5%, or 100% identical to one or more of SEQ ID NOs: 343, 344, 345, 346, 347, 348, 349, 350 and/or 351, or a functional portion of any of the foregoing.

[0265] According to some embodiments, a recombinant DNA molecule, vector or construct is provided comprising a transcribable DNA sequence that comprises or consists of a sequence that is at least 80%, at least 85%, at least 90%, at least 95%, at least 96%, at least 97%, at least 98%, at least 99%, at least 99.5%, or 100% identical to one or more of SEQ ID NOs: 285, 287, 289 and/or 291, wherein the transcribable DNA sequence is operably linked to a plant-expressible promoter. According to some embodiments, the transcribable DNA sequence encodes a GA2 oxidase protein. According to some embodiments, the plant expressible promoter is a vascular promoter. According to some embodiments, the plant expressible promoter is a vascular promoter comprising a sequence that is at least 70%, at least 75%, at least 80%, at least 85%, at least 90%, at least 95%, at least 96%, at least 97%, at least 98%, at least 99%, at least 99.5%, or 100% identical to one or more of SEQ ID NOs: 333, 334, 335, 336, 337, 338 and/or 339, or a functional portion of any of the foregoing. According to some embodiments, the plant expressible promoter is a RTBV promoter (e.g., a promoter comprising the RTBV (SEQ ID NO: 333) or truncated RTBV (SEQ ID NO: 334) sequence) or a promoter comprising a sequence that is at least 70%, at least 75%, at least 80%, at least 85%, at least 90%, at least 95%, at least 96%, at least 97%, at least 98%, at least 99%, at least 99.5%, or 100% identical to SEQ ID NO: 333 and/or 334. According to some embodiments, the plant expressible promoter is a leaf promoter. According to some embodiments, the plant expressible promoter is a leaf promoter comprising a sequence that is at least 70%, at least 75%, at least 80%, at least 85%, at least 90%, at least 95%, at least 96%, at least 97%, at least 98%, at least 99%, at least 99.5%, or 100% identical to one or more of SEQ ID NOs: 340, 341 and/or 342, or a functional portion of any of the foregoing. According to some embodiments, the plant expressible promoter is a constitutive promoter. According to some embodiments, the plant expressible promoter is a constitutive promoter comprising a sequence that is at least 70%, at least 75%, at least 80%, at least 85%, at least 90%, at least 95%, at least 96%, at least 97%, at least 98%, at least 99%, at least 99.5%, or 100% identical to one or more of SEQ ID NOs: 343, 344, 345, 346, 347, 348, 349, 350 and/or 351, or a functional portion of any of the foregoing.

[0266] According to some embodiments, a recombinant DNA molecule, vector or construct is provided comprising a transcribable DNA sequence encoding a GA2 oxidase protein that comprises or consists of a sequence that is at least 80%, at least 85%, at least 90%, at least 95%, at least 96%, at least 97%, at least 98%, at least 99%, at least 99.5%, or 100% identical to one or more of SEQ ID NOs: 294, 296, 298, 300, 302, 304, 306 and/or 308, wherein the transcribable DNA sequence is operably linked to a plant-expressible promoter. According to some of these embodiments, the transcribable DNA sequence of the recombinant DNA molecule, vector or construct comprises or consists of a sequence that is at least 80%, at least 85%, at least 90%, at least 95%, at least 96%, at least 97%, at least 98%, at least 99%, at least 99.5%, or 100% identical to one or more of SEQ ID NOs: 293, 295, 297, 299, 301, 303, 305 and/or 307. According to some embodiments, the plant expressible promoter is a vascular promoter. According to some embodiments, the plant expressible promoter is a vascular promoter comprising a sequence that is at least 70%, at least 75%, at least 80%, at least 85%, at least 90%, at least 95%, at least 96%, at least 97%, at least 98%, at least 99%, at least 99.5%, or 100% identical to one or more of SEQ ID NOs: 333, 334, 335, 336, 337, 338 and/or 339, or a functional portion of any of the foregoing. According to some embodiments, the plant expressible promoter is a RTBV promoter (e.g., a promoter comprising the RTBV (SEQ ID NO: 333) or truncated RTBV (SEQ ID NO: 334) sequence) or a promoter comprising a sequence that is at least 70%, at least 75%, at least 80%, at least 85%, at least 90%, at least 95%, at least 96%, at least 97%, at least 98%, at least 99%, at least 99.5%, or 100% identical to SEQ ID NO: 333 and/or 334. According to some embodiments, the plant expressible promoter is a leaf promoter. According to some embodiments, the plant expressible promoter is a leaf promoter comprising a sequence that is at least 70%, at least 75%, at least 80%, at least 85%, at least 90%, at least 95%, at least 96%, at least 97%, at least 98%, at least 99%, at least 99.5%, or 100% identical to one or more of SEQ ID NOs: 340, 341 and/or 342, or a functional portion of any of the foregoing. According to some embodiments, the plant expressible promoter is a constitutive promoter. According to some embodiments, the plant expressible promoter is a constitutive promoter comprising a sequence that is at least 70%, at least 75%, at least 80%, at least 85%, at least 90%, at least 95%, at least 96%, at least 97%, at least 98%, at least 99%, at least 99.5%, or 100% identical to one or more of SEQ ID NOs: 343, 344, 345, 346, 347, 348, 349, 350 and/or 351, or a functional portion of any of the foregoing.

[0267] According to some embodiments, a recombinant DNA molecule, vector or construct is provided comprising a transcribable DNA sequence that comprises or consists of a sequence that is at least 80%, at least 85%, at least 90%, at least 95%, at least 96%, at least 97%, at least 98%, at least 99%, at least 99.5%, or 100% identical to one or more of SEQ ID NOs: 293, 295, 297, 299, 301, 303, 305 and/or 307, wherein the transcribable DNA sequence is operably linked to a plant-expressible promoter. According to some embodiments, the transcribable DNA sequence encodes a GA2 oxidase protein. According to some embodiments, the plant expressible promoter is a vascular promoter. According to some embodiments, the plant expressible promoter is a vascular promoter comprising a sequence that is at least 70%, at least \75%, at least 80%, at least 85%, at least 90%, at least 95%, at least 96%, at least 97%, at least 98%, at least 99%, at least 99.5%, or 100% identical to one or more of SEQ ID NOs: 333, 334, 335, 336, 337, 338 and/or 339, or a functional portion of any of the foregoing. According to some embodiments, the plant expressible promoter is a RTBV promoter (e.g., a promoter comprising the RTBV (SEQ ID NO: 333) or truncated RTBV (SEQ ID NO: 334) sequence) or a promoter comprising a sequence that is at least 70%, at least 75%, at least 80%, at least 85%, at least 90%, at least 95%, at least 96%, at least 97%, at least 98%, at least 99%, at least 99.5%, or 100% identical to SEQ ID NO: 333 and/or 334. According to some embodiments, the plant expressible promoter is a leaf promoter. According to some embodiments, the plant expressible promoter is a leaf promoter comprising a sequence that is at least 70%, at least 75%, at least 80%, at least 85%, at least 90%, at least 95%, at least 96%, at least 97%, at least 98%, at least 99%, at least 99.5%, or 100% identical to one or more of SEQ ID NOs: 340, 341 and/or 342, or a functional portion of any of the foregoing. According to some embodiments, the plant expressible promoter is a constitutive promoter. According to some embodiments, the plant expressible promoter is a constitutive promoter comprising a sequence that is at least 70%, at least 75%, at least 80%, at least 85%, at least 90%, at least 95%, at least 96%, at least 97%, at least 98%, at least 99%, at least 99.5%, or 100% identical to one or more of SEQ ID NOs: 343, 344, 345, 346, 347, 348, 349, 350 and/or 351, or a functional portion of any of the foregoing.

[0268] According to some embodiments, a recombinant DNA molecule, vector or construct is provided comprising a transcribable DNA sequence encoding a GA2 oxidase protein that comprises or consists of a sequence that is at least 80%, at least 85%, at least 90%, at least 95%, at least 96%, at least 97%, at least 98%, at least 99%, at least 99.5%, or 100% identical to one or more of SEQ ID NOs: 310, 312, 314, 316, 318, 320 and/or 322, wherein the transcribable DNA sequence is operably linked to a plant-expressible promoter. According to some of these embodiments, the transcribable DNA sequence of the recombinant DNA molecule, vector or construct comprises or consists of a sequence that is at least 80%, at least 85%, at least 90%, at least 95%, at least 96%, at least 97%, at least 98%, at least 99%, at least 99.5%, or 100% identical to one or more of SEQ ID NOs: 309, 311, 313, 315, 317, 319 and/or 321. According to some embodiments, the plant expressible promoter is a vascular promoter. According to some embodiments, the plant expressible promoter is a vascular promoter comprising a sequence that is at least 70%, at least 75%, at least 80%, at least 85%, at least 90%, at least 95%, at least 96%, at least 97%, at least 98%, at least 99%, at least 99.5%, or 100% identical to one or more of SEQ ID NOs: 333, 334, 335, 336, 337, 338 and/or 339, or a functional portion of any of the foregoing. According to some embodiments, the plant expressible promoter is a RTBV promoter (e.g., a promoter comprising the RTBV (SEQ ID NO: 333) or truncated RTBV (SEQ ID NO: 334) sequence) or a promoter comprising a sequence that is at least 70%, at least 75%, at least 80%, at least 85%, at least 90%, at least 95%, at least 96%, at least 97%, at least 98%, at least 99%, at least 99.5%, or 100% identical to SEQ ID NO: 333 and/or 334. According to some embodiments, the plant expressible promoter is a leaf promoter. According to some embodiments, the plant expressible promoter is a leaf promoter comprising a sequence that is at least 70%, at least 75%, at least 80%, at least 85%, at least 90%, at least 95%, at least 96%, at least 97%, at least 98%, at least 99%, at least 99.5%, or 100% identical to one or more of SEQ ID NOs: 340, 341 and/or 342, or a functional portion of any of the foregoing. According to some embodiments, the plant expressible promoter is a constitutive promoter. According to some embodiments, the plant expressible promoter is a constitutive promoter comprising a sequence that is at least 70%, at least 75%, at least 80%, at least 85%, at least 90%, at least 95%, at least 96%, at least 97%, at least 98%, at least 99%, at least 99.5%, or 100% identical to one or more of SEQ ID NOs: 343, 344, 345, 346, 347, 348, 349, 350 and/or 351, or a functional portion of any of the foregoing.

[0269] According to some embodiments, a recombinant DNA molecule, vector or construct is provided comprising a transcribable DNA sequence that comprises or consists of a sequence that is at least 80%, at least 85%, at least 90%, at least 95%, at least 96%, at least 97%, at least 98%, at least 99%, at least 99.5%, or 100% identical to one or more of SEQ ID NOs: 309, 311, 313, 315, 317, 319 and/or 321, wherein the transcribable DNA sequence is operably linked to a plant-expressible promoter. According to some embodiments, the transcribable DNA sequence encodes a GA2 oxidase protein. According to some embodiments, the plant expressible promoter is a vascular promoter. According to some embodiments, the plant expressible promoter is a vascular promoter comprising a sequence that is at least 70%, at least \75%, at least 80%, at least 85%, at least 90%, at least 95%, at least 96%, at least 97%, at least 98%, at least 99%, at least 99.5%, or 100% identical to one or more of SEQ ID NOs: 333, 334, 335, 336, 337, 338 and/or 339, or a functional portion of any of the foregoing. According to some embodiments, the plant expressible promoter is a RTBV promoter (e.g., a promoter comprising the RTBV (SEQ ID NO: 333) or truncated RTBV (SEQ ID NO: 334) sequence) or a promoter comprising a sequence that is at least 70%, at least 75%, at least 80%, at least 85%, at least 90%, at least 95%, at least 96%, at least 97%, at least 98%, at least 99%, at least 99.5%, or 100% identical to SEQ ID NO: 333 and/or 334. According to some embodiments, the plant expressible promoter is a leaf promoter. According to some embodiments, the plant expressible promoter is a leaf promoter comprising a sequence that is at least 70%, at least 75%, at least 80%, at least 85%, at least 90%, at least 95%, at least 96%, at least 97%, at least 98%, at least 99%, at least 99.5%, or 100% identical to one or more of SEQ ID NOs: 340, 341 and/or 342, or a functional portion of any of the foregoing. According to some embodiments, the plant expressible promoter is a constitutive promoter. According to some embodiments, the plant expressible promoter is a constitutive promoter comprising a sequence that is at least 70%, at least 75%, at least 80%, at least 85%, at least 90%, at least 95%, at least 96%, at least 97%, at least 98%, at least 99%, at least 99.5%, or 100% identical to one or more of SEQ ID NOs: 343, 344, 345, 346, 347, 348, 349, 350 and/or 351, or a functional portion of any of the foregoing.

[0270] According to some embodiments, a recombinant DNA molecule, vector or construct is provided comprising a transcribable DNA sequence encoding a GA2 oxidase protein that comprises or consists of a sequence that is at least 80%, at least 85%, at least 90%, at least 95%, at least 96%, at least 97%, at least 98%, at least 99%, at least 99.5%, or 100% identical to one or more of SEQ ID NOs: 324 and/or 326, wherein the transcribable DNA sequence is operably linked to a plant-expressible promoter. According to some of these embodiments, the transcribable DNA sequence of the recombinant DNA molecule, vector or construct comprises or consists of a sequence that is at least 80%, at least 85%, at least 90%, at least 95%, at least 96%, at least 97%, at least 98%, at least 99%, at least 99.5%, or 100% identical to one or more of SEQ ID NOs: 323 and/or 325. According to some embodiments, the plant expressible promoter is a vascular promoter. According to some embodiments, the plant expressible promoter is a vascular promoter comprising a sequence that is at least 70%, at least 75%, at least 80%, at least 85%, at least 90%, at least 95%, at least 96%, at least 97%, at least 98%, at least 99%, at least 99.5%, or 100% identical to one or more of SEQ ID NOs: 333, 334, 335, 336, 337, 338 and/or 339, or a functional portion of any of the foregoing. According to some embodiments, the plant expressible promoter is a RTBV promoter (e.g., a promoter comprising the RTBV (SEQ ID NO: 333) or truncated RTBV (SEQ ID NO: 334) sequence) or a promoter comprising a sequence that is at least 70%, at least 75%, at least 80%, at least 85%, at least 90%, at least 95%, at least 96%, at least 97%, at least 98%, at least 99%, at least 99.5%, or 100% identical to SEQ ID NO: 333 and/or 334. According to some embodiments, the plant expressible promoter is a leaf promoter. According to some embodiments, the plant expressible promoter is a leaf promoter comprising a sequence that is at least 70%, at least 75%, at least 80%, at least 85%, at least 90%, at least 95%, at least 96%, at least 97%, at least 98%, at least 99%, at least 99.5%, or 100% identical to one or more of SEQ ID NOs: 340, 341 and/or 342, or a functional portion of any of the foregoing. According to some embodiments, the plant expressible promoter is a constitutive promoter. According to some embodiments, the plant expressible promoter is a constitutive promoter comprising a sequence that is at least 70%, at least 75%, at least 80%, at least 85%, at least 90%, at least 95%, at least 96%, at least 97%, at least 98%, at least 99%, at least 99.5%, or 100% identical to one or more of SEQ ID NOs: 343, 344, 345, 346, 347, 348, 349, 350 and/or 351, or a functional portion of any of the foregoing.

[0271] According to some embodiments, a recombinant DNA molecule, vector or construct is provided comprising a transcribable DNA sequence that comprises or consists of a sequence that is at least 80%, at least 85%, at least 90%, at least 95%, at least 96%, at least 97%, at least 98%, at least 99%, at least 99.5%, or 100% identical to one or more of SEQ ID NOs: 323 and/or 325, wherein the transcribable DNA sequence is operably linked to a plant-expressible promoter. According to some embodiments, the transcribable DNA sequence encodes a GA2 oxidase protein. According to some embodiments, the plant expressible promoter is a vascular promoter. According to some embodiments, the plant expressible promoter is a vascular promoter comprising a sequence that is at least 70%, at least \75%, at least 80%, at least 85%, at least 90%, at least 95%, at least 96%, at least 97%, at least 98%, at least 99%, at least 99.5%, or 100% identical to one or more of SEQ ID NOs: 333, 334, 335, 336, 337, 338 and/or 339, or a functional portion of any of the foregoing. According to some embodiments, the plant expressible promoter is a RTBV promoter (e.g., a promoter comprising the RTBV (SEQ ID NO: 333) or truncated RTBV (SEQ ID NO: 334) sequence) or a promoter comprising a sequence that is at least 70%, at least 75%, at least 80%, at least 85%, at least 90%, at least 95%, at least 96%, at least 97%, at least 98%, at least 99%, at least 99.5%, or 100% identical to SEQ ID NO: 333 and/or 334. According to some embodiments, the plant expressible promoter is a leaf promoter. According to some embodiments, the plant expressible promoter is a leaf promoter comprising a sequence that is at least 70%, at least 75%, at least 80%, at least 85%, at least 90%, at least 95%, at least 96%, at least 97%, at least 98%, at least 99%, at least 99.5%, or 100% identical to one or more of SEQ ID NOs: 340, 341 and/or 342, or a functional portion of any of the foregoing. According to some embodiments, the plant expressible promoter is a constitutive promoter. According to some embodiments, the plant expressible promoter is a constitutive promoter comprising a sequence that is at least 70%, at least 75%, at least 80%, at least 85%, at least 90%, at least 95%, at least 96%, at least 97%, at least 98%, at least 99%, at least 99.5%, or 100% identical to one or more of SEQ ID NOs: 343, 344, 345, 346, 347, 348, 349, 350 and/or 351, or a functional portion of any of the foregoing.

[0272] According to some embodiments, a recombinant DNA molecule, vector or construct is provided comprising a transcribable DNA sequence encoding a GA2 oxidase protein that comprises or consists of a sequence that is at least 80%, at least 85%, at least 90%, at least 95%, at least 96%, at least 97%, at least 98%, at least 99%, at least 99.5%, or 100% identical to one or more of SEQ ID NOs: 328, 330 and/or 332, wherein the transcribable DNA sequence is operably linked to a plant-expressible promoter. According to some of these embodiments, the transcribable DNA sequence of the recombinant DNA molecule, vector or construct comprises or consists of a sequence that is at least 80%, at least 85%, at least 90%, at least 95%, at least 96%, at least 97%, at least 98%, at least 99%, at least 99.5%, or 100% identical to one or more of SEQ ID NOs: 327, 329 and/or 331. According to some embodiments, the plant expressible promoter is a vascular promoter. According to some embodiments, the plant expressible promoter is a vascular promoter comprising a sequence that is at least 70%, at least 75%, at least 80%, at least 85%, at least 90%, at least 95%, at least 96%, at least 97%, at least 98%, at least 99%, at least 99.5%, or 100% identical to one or more of SEQ ID NOs: 333, 334, 335, 336, 337, 338 and/or 339, or a functional portion of any of the foregoing. According to some embodiments, the plant expressible promoter is a RTBV promoter (e.g., a promoter comprising the RTBV (SEQ ID NO: 333) or truncated RTBV (SEQ ID NO: 334) sequence) or a promoter comprising a sequence that is at least 70%, at least 75%, at least 80%, at least 85%, at least 90%, at least 95%, at least 96%, at least 97%, at least 98%, at least 99%, at least 99.5%, or 100% identical to SEQ ID NO: 333 and/or 334. According to some embodiments, the plant expressible promoter is a leaf promoter. According to some embodiments, the plant expressible promoter is a leaf promoter comprising a sequence that is at least 70%, at least 75%, at least 80%, at least 85%, at least 90%, at least 95%, at least 96%, at least 97%, at least 98%, at least 99%, at least 99.5%, or 100% identical to one or more of SEQ ID NOs: 340, 341 and/or 342, or a functional portion of any of the foregoing. According to some embodiments, the plant expressible promoter is a constitutive promoter. According to some embodiments, the plant expressible promoter is a constitutive promoter comprising a sequence that is at least 70%, at least 75%, at least 80%, at least 85%, at least 90%, at least 95%, at least 96%, at least 97%, at least 98%, at least 99%, at least 99.5%, or 100% identical to one or more of SEQ ID NOs: 343, 344, 345, 346, 347, 348, 349, 350 and/or 351, or a functional portion of any of the foregoing.

[0273] According to some embodiments, a recombinant DNA molecule, vector or construct is provided comprising a transcribable DNA sequence that comprises or consists of a sequence that is at least 80%, at least 85%, at least 90%, at least 95%, at least 96%, at least 97%, at least 98%, at least 99%, at least 99.5%, or 100% identical to one or more of SEQ ID NOs: 327, 329 and/or 331, wherein the transcribable DNA sequence is operably linked to a plant-expressible promoter. According to some embodiments, the transcribable DNA sequence encodes a GA2 oxidase protein. According to some embodiments, the plant expressible promoter is a vascular promoter. According to some embodiments, the plant expressible promoter is a vascular promoter comprising a sequence that is at least 70%, at least \75%, at least 80%, at least 85%, at least 90%, at least 95%, at least 96%, at least 97%, at least 98%, at least 99%, at least 99.5%, or 100% identical to one or more of SEQ ID NOs: 333, 334, 335, 336, 337, 338 and/or 339, or a functional portion of any of the foregoing. According to some embodiments, the plant expressible promoter is a RTBV promoter (e.g., a promoter comprising the RTBV (SEQ ID NO: 333) or truncated RTBV (SEQ ID NO: 334) sequence) or a promoter comprising a sequence that is at least 70%, at least 75%, at least 80%, at least 85%, at least 90%, at least 95%, at least 96%, at least 97%, at least 98%, at least 99%, at least 99.5%, or 100% identical to SEQ ID NO: 333 and/or 334. According to some embodiments, the plant expressible promoter is a leaf promoter. According to some embodiments, the plant expressible promoter is a leaf promoter comprising a sequence that is at least 70%, at least 75%, at least 80%, at least 85%, at least 90%, at least 95%, at least 96%, at least 97%, at least 98%, at least 99%, at least 99.5%, or 100% identical to one or more of SEQ ID NOs: 340, 341 and/or 342, or a functional portion of any of the foregoing. According to some embodiments, the plant expressible promoter is a constitutive promoter. According to some embodiments, the plant expressible promoter is a constitutive promoter comprising a sequence that is at least 70%, at least 75%, at least 80%, at least 85%, at least 90%, at least 95%, at least 96%, at least 97%, at least 98%, at least 99%, at least 99.5%, or 100% identical to one or more of SEQ ID NOs: 343, 344, 345, 346, 347, 348, 349, 350 and/or 351, or a functional portion of any of the foregoing.

[0274] According to many embodiments, a modified or transgenic corn plant is provided comprising and/or transformed with a recombinant DNA construct comprising a transcribable DNA sequence encoding a GA2 oxidase protein as provided herein. According to some embodiments, a modified or transgenic corn plant is provided that is transformed with a recombinant DNA construct comprising a transcribable DNA sequence encoding a GA2 oxidase mRNA and protein, wherein the transcribable DNA sequence is operably linked to a plant-expressible promoter, wherein the GA2 oxidase mRNA and/or protein is identical to an endogenous GA2 oxidase protein, and wherein the expression level of the GA2 oxidase mRNA and/or protein is increased in one or more plant tissue(s) of the modified or transgenic plant as compared to a wild type or control plant, such as increased in one or more vascular and/or leaf tissue(s) of the modified or transgenic plant, such as by at least 5%, at least 10%, at least 20%, at least 25%, at least 30%, at least 40%, at least 50%, at least 60%, at least 70%, at least 75%, at least 80%, at least 90%, or 100%, as compared to a wild type or control plant.

[0275] According to present embodiments, a modified or transgenic corn plant is provided comprising a recombinant DNA construct comprising a transcribable DNA sequence encoding a GA2 oxidase protein as provided herein, wherein the level of one or more active GAs, such as GAL, GA3, GA4, and/or GA7, is reduced or lowered in one or more plant tissue(s), such as one or more stem, internode, vascular and/or leaf tissue(s) or one or more stem and/or internode tissue(s), of the modified or transgenic plant, such as by at least 5%, at least 10%, at least 20%, at least 25%, at least 30%, at least 40%, at least 50%, at least 60%, at least 70%, at least 75%, at least 80%, at least 90%, or 100%, as compared to a wild type or control plant.

[0276] According to many embodiments, a modified or transgenic plant is provided that is transformed with a recombinant DNA construct comprising a transcribable DNA sequence encoding a GA2 oxidase protein as provided herein, wherein the transcribable DNA sequence is operably linked to a constitutive promoter or a tissue-specific or tissue-preferred promoter, such as a vascular promoter or a leaf promoter, and wherein the modified or transgenic plant has one or more of the following traits: a semi-dwarf or reduced plant height or stature, decreased stem internode length, increased lodging resistance, and/or increased stem or stalk diameter. Such a modified or transgenic plant may not have any significant reproductive off-types. A modified or transgenic plant may have one or more of the following additional traits: reduced green snap, deeper roots, increased leaf area, earlier canopy closure, higher stomatal conductance, lower ear height, increased foliar water content, improved drought tolerance, increased nitrogen use efficiency, increased water use efficiency, reduced anthocyanin content and anthocyanin area in leaves under normal and/or nitrogen or water limiting stress conditions, increased ear weight, increased kernel number, increased kernel weight, increased yield, and/or increased harvest index. According to many embodiments, the level of one or more active GAs, such as GA1, GA3, GA4, and/or GA7, is/are reduced or lowered in one or more plant tissue(s), such as one or more stem, internode, vascular and/or leaf tissue(s), or one or more stem and/or internode tissue(s), of the modified or transgenic plant, such as by at least 5%, at least 10%, at least 20%, at least 25%, at least 30%, at least 40%, at least 50%, at least 60%, at least 70%, at least 75%, at least 80%, at least 90%, or 100%, as compared to a wild type or control plant.

[0277] A recombinant DNA molecule, construct or vector of the present disclosure may comprise a transcribable DNA sequence encoding a GA2 oxidase as provided herein, wherein the transcribable DNA sequence is operatively linked to a plant-expressible promoter, such as a constitutive or vascular and/or leaf promoter. In addition to its associated promoter, a transcribable DNA sequence encoding a GA2 oxidase may also be operatively linked to one or more additional regulatory element(s), such as an enhancer(s), leader, transcription start site (TSS), linker, 5′ and 3′ untranslated region(s) (UTRs), intron(s), polyadenylation signal, termination region or sequence, etc., that are suitable, necessary or preferred for strengthening, regulating or allowing expression of the transcribable DNA sequence in a corn plant cell. Such additional regulatory element(s) may be optional and/or used to enhance or optimize expression of the transgene or transcribable DNA sequence. As provided herein, an “enhancer” may be distinguished from a “promoter” in that an enhancer typically lacks a transcription start site, TATA box, or equivalent sequence and is thus insufficient alone to drive transcription. As used herein, a “leader” may be defined generally as the DNA sequence of the 5′-UTR of a gene (or transgene) between the transcription start site (TSS) and 5′ end of the transcribable DNA sequence or protein coding sequence start site of the transgene.

[0278] According to further embodiments, methods are provided for transforming a plant cell, tissue or explant with a recombinant DNA molecule, vector or construct comprising a transcribable DNA sequence or transgene operably linked to a plant-expressible promoter to produce a transgenic plant. The transcribable DNA sequence may encode a GA2 oxidase as provided herein. Numerous methods for transforming chromosomes or plastids in a plant cell with a recombinant DNA molecule, vector or construct are known in the art, which may be used according to method embodiments of the present invention to produce a transgenic plant cell and plant. Any suitable method or technique for transformation of a plant cell known in the art may be used according to present methods. Effective methods for transformation of plants include bacterially mediated transformation, such as Agrobacterium-mediated or Rhizobium-mediated transformation, and microprojectile or particle bombardment-mediated transformation. A variety of methods are known in the art for transforming explants with a transformation vector via bacterially mediated transformation or microprojectile or particle bombardment and then subsequently culturing, etc., those explants to regenerate or develop transgenic plants. Other methods for plant transformation, such as microinjection, electroporation, vacuum infiltration, pressure, sonication, silicon carbide fiber agitation, PEG-mediated transformation, etc., are also known in the art.

[0279] Methods of transforming plant cells and explants are well known by persons of ordinary skill in the art. Methods for transforming plant cells by microprojectile bombardment with particles coated with recombinant DNA are provided, for example, in U.S. Pat. Nos. 5,550,318; 5,538,880 6,160,208; 6,399,861; and 6,153,812, and Agrobacterium-mediated transformation is described, for example, in U.S. Pat. Nos. 5,159,135; 5,824,877; 5,591,616; 6,384,301; 5,750,871; 5,463,174; and 5,188,958, all of which are incorporated herein by reference. Additional methods for transforming plants can be found in, for example, Compendium of Transgenic Crop Plants (2009) Blackwell Publishing. Any suitable method of plant transformation known or later developed in the art can be used to transform a plant cell or explant with any of the nucleic acid molecules, constructs or vectors provided herein.

[0280] Transgenic plants produced by transformation methods may be chimeric or non-chimeric for the transformation event depending on the methods and explants used. Methods are further provided for expressing a GA2 oxidase transgene in one or more plant cells or tissues under the control of a plant-expressible promoter, such as a constitutive, tissue-specific, tissue-preferred, vascular and/or leaf promoter as provided herein. Such methods may be used to create transgenic corn plants having a shorter, semi-dwarf stature, reduced internode length, increased stalk/stem diameter, and/or improved lodging resistance. Such transgenic corn plants may further have other traits that may be beneficial for yield, such as reduced green snap, deeper roots, increased leaf area, earlier canopy closure, improved drought tolerance, increased nitrogen use efficiency, increased water use efficiency, higher stomatal conductance, lower ear height, increased foliar water content, reduced anthocyanin content and/or area in leaves under normal or nitrogen or water limiting stress conditions, increased ear weight, increased seed or kernel number, increased seed or kernel weight, increased yield, and/or increased harvest index, relative to a wild type or control plant. As used herein, “harvest index” refers to the mass of the harvested grain divided by the total mass of the above-ground biomass of the plant over a harvested area.

[0281] Transgenic plants expressing a GA2 oxidase transgene may have an earlier canopy closure (e.g., approximately one day earlier, or 12-48 hours, 12-36 hours, 18-36 hours, or about 24 hours earlier canopy closure) than a wild type or control plant. Although transgenic plants expressing a GA2 oxidase transgene may have a lower ear height than a wild type or control plant, the height of the ear may generally be at least 18 inches above the ground. Transgenic plants expressing a GA2 oxidase may have greater biomass and/or leaf area during one or more late vegetative stages (e.g., V8-V12) than a wild type or control plant. Transgenic plants expressing a GA2 oxidase may have deeper roots during later vegetative stages when grown in the field, than a wild type or control plant, which may be due to an increased root front velocity. These transgenic plants may reach a depth 90 cm below ground sooner (e.g., 5-25 days sooner, 5-20 days sooner, 5-15 days sooner, 10-25 days sooner, or 15-25 days sooner, or about 5, 10, 15, 20 Or 25 days sooner) than a wild type or control plant, which may occur by or prior to the vegetative to reproductive transition of the plant (e.g., by V16/R1 at about 50 days after planting as opposed to about 70 days after planting for control plants).

[0282] Recipient cell(s) or explant or cellular targets for transformation include, but are not limited to, a seed cell, a fruit cell, a leaf cell, a cotyledon cell, a hypocotyl cell, a meristem cell, an embryo cell, an endosperm cell, a root cell, a shoot cell, a stem cell, a pod cell, a flower cell, an inflorescence cell, a stalk cell, a pedicel cell, a style cell, a stigma cell, a receptacle cell, a petal cell, a sepal cell, a pollen cell, an anther cell, a filament cell, an ovary cell, an ovule cell, a pericarp cell, a phloem cell, a bud cell, a callus cell, a chloroplast, a stomatal cell, a trichome cell, a root hair cell, a storage root cell, or a vascular tissue cell, a seed, embryo, meristem, cotyledon, hypocotyl, endosperm, root, shoot, stem, node, callus, cell suspension, protoplast, flower, leaf, pollen, anther, ovary, ovule, pericarp, bud, and/or vascular tissue, or any transformable portion of any of the foregoing. For plant transformation, any target cell(s), tissue(s), explant(s), etc., that may be used to receive a recombinant DNA transformation vector or molecule of the present disclosure may be collectively be referred to as an “explant” for transformation. Preferably, a transformable or transformed explant cell or tissue may be further developed or regenerated into a plant. Any cell or explant from which a fertile plant can be grown or regenerated is contemplated as a useful recipient cell or explant for practice of this disclosure (i.e., as a target explant for transformation). Callus can be initiated or created from various tissue sources, including, but not limited to, embryos or parts of embryos, non-embryonic seed tissues, seedling apical meristems, microspores, and the like. Any cells that are capable of proliferating as callus may serve as recipient cells for transformation. Transformation methods and materials for making transgenic plants (e.g., various media and recipient target cells or explants and methods of transformation and subsequent regeneration of into transgenic plants) are known in the art.

[0283] Transformation of a target plant material or explant may be practiced in tissue culture on nutrient media, for example a mixture of nutrients that allow cells to grow in vitro or cell culture. Transformed explants, cells or tissues may be subjected to additional culturing steps, such as callus induction, selection, regeneration, etc., as known in the art. Transformation may also be carried out without creation or use of a callus tissue. Transformed cells, tissues or explants containing a recombinant DNA sequence insertion or event may be grown, developed or regenerated into transgenic plants in culture, plugs, or soil according to methods known in the art. Transgenic plants may be further crossed to themselves or other plants to produce transgenic seeds and progeny. A transgenic plant may also be prepared by crossing a first plant comprising the recombinant DNA sequence or transformation event with a second plant lacking the insertion. For example, a recombinant DNA construct or sequence may be introduced into a first plant line that is amenable to transformation, which may then be crossed with a second plant line to introgress the recombinant DNA construct or sequence into the second plant line. Progeny of these crosses can be further back crossed into the more desirable line multiple times, such as through 6 to 8 generations or back crosses, to produce a progeny plant with substantially the same genotype as the original parental line, but for the introduction of the recombinant DNA construct or sequence.

[0284] A transgenic plant, plant part, cell, or explant provided herein may be of an elite variety or an elite line. An elite variety or an elite line refers to a variety that has resulted from breeding and selection for superior agronomic performance. A transgenic plant, cell, or explant provided herein may be a hybrid plant, cell, or explant. As used herein, a “hybrid” is created by crossing two plants from different varieties, lines, inbreds, or species, such that the progeny comprises genetic material from each parent. Skilled artisans recognize that higher order hybrids can be generated as well. For example, a first hybrid can be made by crossing Variety A with Variety B to create a A×B hybrid, and a second hybrid can be made by crossing Variety C with Variety D to create an C×D hybrid. The first and second hybrids can be further crossed to create the higher order hybrid (A×B)×(C×D) comprising genetic information from all four parent varieties.

[0285] According to some embodiments, a recombinant DNA construct or vector may comprise two or more expression elements or cassettes that may be stacked together in a construct or vector either in tandem in a single expression cassette or separately in two or more expression cassettes. A recombinant DNA construct or vector may comprise either a single expression cassette comprising a transcribable DNA sequence that encodes a GA2 oxidase mRNA and protein or two or more expression cassettes comprising two or more transcribable DNA sequences that encode two or more GA2 oxidase mRNAs and proteins, including at least a first GA2 oxidase mRNA and protein and a second GA2 oxidase mRNA and protein, wherein the two or more transcribable DNA sequences, GA2 oxidase mRNAs and/or GA2 oxidase proteins are the same or different, and wherein each transcribable DNA sequence is operably linked to a plant-expressible promoter. The plant-expressible promoter may be a constitutive promoter, or a tissue-specific or tissue-preferred promoter, as provided herein. If two or more transcribable DNA sequences are present in a recombinant DNA construct or vector or a modified or transgenic plant, plant part, cell, or explant, each transcribable DNA sequence may be operably linked to the same or different plant-expressible promoters.

[0286] According to other embodiments, a recombinant DNA construct or vector may comprise two or more expression cassettes including a first expression cassette and a second expression cassette, wherein the first expression cassette comprises a first transcribable DNA sequence operably linked to a first plant-expressible promoter, and the second expression cassette comprises a second transcribable DNA sequence operably linked to a second plant-expressible promoter, wherein the first transcribable DNA sequence encodes a first GA2 oxidase and the second transcribable DNA sequence encodes a second GA2 oxidase. The first and second plant-expressible promoters may each be a constitutive promoter, or a tissue-specific or tissue-preferred promoter, as provided herein, and the first and second plant-expressible promoters may be the same or different promoters.

[0287] According to other embodiments, two or more constructs, expression cassettes or transgenes encoding one or more GA2 oxidase proteins may be combined in a modified plant by crossing two or more plants together in one or more generations to produce a modified plant having a desired combination of the constructs, expression cassettes or transgenes. According to these embodiments, a first modified plant comprising a first construct, expression cassette or transgene encoding a first GA2 oxidase protein may be crossed to a second modified plant comprising a second construct, expression cassette or transgene encoding a second GA2 oxidase protein, such that a modified progeny plant may be made comprising the first construct, expression cassette or transgene and the second construct, expression cassette or transgene. Alternatively, a modified plant comprising two or more constructs, expression cassettes or transgenes encoding two or more GA2 oxidase proteins may be made by (i) co-transforming a first construct, expression cassette or transgene and a second construct, expression cassette or transgene (each encoding a GA2 oxidase protein) in the same or different transformation molecules or vectors, (ii) transforming a modified plant with a second construct, expression cassette or transgene in a transformation molecule or vector, wherein the modified plant already comprises a first construct, expression cassette or transgene, or (iii) transforming a plant with a first construct, expression cassette or transgene in a first transformation molecule or vector, and then transforming the plant with a second construct, expression cassette or transgene in a second transformation molecule or vector.

[0288] According to embodiments of the present disclosure, modified plants are provided comprising two or more constructs comprising GA2 oxidase transgene(s) including a first recombinant DNA construct and a second recombinant DNA construct, wherein the first recombinant DNA construct comprises a first transcribable DNA sequence encoding a first GA2 oxidase mRNA and protein, and the second recombinant DNA construct comprises a second transcribable DNA sequence encoding a second GA2 oxidase mRNA and protein. The first and second recombinant DNA constructs may be stacked in a single vector and transformed into a plant as a single event, or present in separate vectors or constructs that may be transformed as separate events. According to some embodiments, the first and second GA2 oxidase transgenes may be the same or different GA oxidase gene(s).

[0289] A recombinant DNA molecule, construct or expression cassette of the present disclosure may comprise or be included within a DNA transformation vector or molecule for use in transformation of a target plant cell, tissue or explant. Such a transformation vector may generally comprise sequences or elements necessary or beneficial for effective transformation in addition to at least one transgene, expression cassette and/or transcribable DNA sequence encoding a GA2 oxidase. For Agrobacterium-mediated, Rhizobia-mediated or other bacteria-mediated transformation, the transformation vector may comprise an engineered transfer DNA (or T-DNA) segment or region having two border sequences, a left border (LB) and a right border (RB), flanking at least a transcribable DNA sequence or transgene, such that insertion of the T-DNA into the plant genome will create a transformation event for the transcribable DNA sequence, transgene or expression cassette. Thus, a transcribable DNA sequence, transgene or expression cassette encoding a GA2 oxidase may be located between the left and right borders of the T-DNA, perhaps along with an additional transgene(s) or expression cassette(s), such as a plant selectable marker transgene and/or other gene(s) of agronomic interest that may confer a trait or phenotype of agronomic interest to a plant. According to alternative embodiments, the transcribable DNA sequence, transgene or expression cassette encoding a GA2 oxidase and the plant selectable marker transgene (or other gene of agronomic interest) may be present in separate T-DNA segments on the same or different recombinant DNA molecule(s), such as for co-transformation. A transformation vector or construct may further comprise prokaryotic maintenance elements, which may be located in the vector outside of the T-DNA region(s).

[0290] A plant selectable marker transgene in a transformation vector or construct of the present disclosure may be used to assist in the selection of transformed cells or tissue due to the presence of a selection agent, such as an antibiotic or herbicide, wherein the plant selectable marker transgene provides tolerance or resistance to the selection agent. Thus, the selection agent may bias or favor the survival, development, growth, proliferation, etc., of transformed cells expressing the plant selectable marker gene, such as to increase the proportion of transformed cells or tissues in the R₀ plant. Commonly used plant selectable marker genes include, for example, those conferring tolerance or resistance to antibiotics, such as kanamycin and paromomycin (nptII), hygromycin B (aph IV), streptomycin or spectinomycin (aadA) and gentamycin (aac3 and aacC4), or those conferring tolerance or resistance to herbicides such as glufosinate (bar or pat), dicamba (DMO) and glyphosate (aroA or EPSPS). Plant screenable marker genes may also be used, which provide an ability to visually screen for transformants, such as luciferase or green fluorescent protein (GFP), or a gene expressing a beta glucuronidase or uidA gene (GUS) for which various chromogenic substrates are known. In some embodiments, a vector or polynucleotide provided herein comprises at least one selectable marker gene selected from the group consisting of nptII, aph IV, aadA, aac3, aacC4, bar, pat, DMO, EPSPS, aroA, GFP, and GUS. Plant transformation may also be carried out in the absence of selection during one or more steps or stages of culturing, developing or regenerating transformed explants, tissues, plants and/or plant parts.

[0291] According to present embodiments, methods for transforming a plant cell, tissue or explant with a recombinant DNA molecule or construct may further include site-directed or targeted integration. According to these methods, a portion of a recombinant DNA donor template molecule (i.e., an insertion sequence) may be inserted or integrated at a desired target site or locus within the plant genome. The insertion sequence of the donor template may comprise a transgene or construct, such as a transgene or transcribable DNA sequence encoding a GA2 oxidase mRNA and protein. The donor template may also have one or two homology arms flanking the insertion sequence to promote the targeted insertion event through homologous recombination and/or homology-directed repair. Each homology arm may be at least 70%, at least 75%, at least 80%, at least 85%, at least 90%, at least 95%, at least 96%, at least 97%, at least 99% or 100% identical or complementary to at least 20, at least 25, at least 30, at least 35, at least 40, at least 45, at least 50, at least 60, at least 70, at least 80, at least 90, at least 100, at least 150, at least 200, at least 250, at least 500, at least 1000, at least 2500, or at least 5000 consecutive nucleotides of a target DNA sequence within the genome of a corn plant. Thus, a recombinant DNA molecule of the present disclosure may comprise a donor template for site-directed or targeted integration of a transgene or construct, such as a transgene or transcribable DNA sequence encoding a GA2 oxidase, into the genome of a plant.

[0292] As used herein, a “targeted genome editing technique” for site-directed integration refers to any method, protocol, or technique that allows the precise and/or targeted insertion of a recombinant DNA construct, transgene and/or expression cassette comprising a transcribable DNA sequence encoding a GA2 oxidase mRNA and protein into a target site in a genome of a plant using a site-specific nuclease, such as a meganuclease, a zinc-finger nuclease (ZFN), an RNA-guided endonuclease (e.g., the CRISPR/Cas9 system), a TALE-endonuclease (TALEN), a recombinase, or a transposase, wherein the recombinant DNA construct, transgene and/or expression cassette is provided by an insertion sequence of a DNA donor template or molecule.

[0293] Any site or locus within the genome of a plant may potentially be chosen for site-directed integration of a transgene, construct or transcribable DNA sequence provided herein. For site-directed integration, a double-strand break (DSB) or nick may first be made at a selected genomic locus with a site-specific nuclease, such as, for example, a zinc-finger nuclease, an engineered or native meganuclease, a TALE-endonuclease, or an RNA-guided endonuclease (e.g., Cas9 or Cpf1). Any method known in the art for site-directed integration may be used. In the presence of a donor template molecule with an insertion sequence, the DSB or nick may then be repaired by homologous recombination between homology arm(s) of the donor template and the plant genome, or by non-homologous end joining (NHEJ), resulting in site-directed integration of the insertion sequence into the plant genome to create the targeted insertion event at the site of the DSB or nick. Thus, site-specific insertion or integration of a transgene, construct or sequence may be achieved.

[0294] A site-specific nuclease provided herein may be selected from the group consisting of a zinc-finger nuclease (ZFN), a meganuclease, an RNA-guided endonuclease, a TALE-endonuclease (TALEN), a recombinase, a transposase, or any combination thereof. See, e.g., Khandagale, K. et al., “Genome editing for targeted improvement in plants,” Plant Biotechnol Rep 10: 327-343 (2016); and Gaj, T. et al., “ZFN, TALEN and CRISPR/Cas-based methods for genome engineering,” Trends Biotechnol. 31(7): 397-405 (2013), the contents and disclosures of which are incorporated herein by reference. A recombinase may be a serine recombinase attached to a DNA recognition motif, a tyrosine recombinase attached to a DNA recognition motif or other recombinase enzyme known in the art. A recombinase or transposase may be a DNA transposase or recombinase attached to a DNA binding domain. A tyrosine recombinase attached to a DNA recognition motif may be selected from the group consisting of a Cre recombinase, a Flp recombinase, and a Tnp1 recombinase. According to some embodiments, a Cre recombinase or a Gin recombinase provided herein is tethered to a zinc-finger DNA binding domain. In another embodiment, a serine recombinase attached to a DNA recognition motif provided herein is selected from the group consisting of a PhiC31 integrase, an R4 integrase, and a TP-901 integrase. In another embodiment, a DNA transposase attached to a DNA binding domain provided herein is selected from the group consisting of a TALE-piggyBac and TALE-Mutator.

[0295] According to embodiments of the present disclosure, an RNA-guided endonuclease may be selected from the group consisting of Cas1, Cas1B, Cas2, Cas3, Cas4, Cas5, Cas6, Cas7, Cas8, Cas9 (also known as Csn1 and Csx12), Cas10, Csy1, Csy2, Csy3, Cse1, Cse2, Csc1, Csc2, Csa5, Csn2, Csm2, Csm3, Csm4, Csm5, Csm6, Cmr1, Cmr3, Cmr4, Cmr5, Cmr6, Csb1, Csb2, Csb3, Csx17, Csx14, Csx10, Csx16, CsaX, Csx3, Csx1, Csx15, Csf1, Csf2, Csf3, Csf4, Cpf1, CasX, CasY, and homologs or modified versions thereof, Argonaute (non-limiting examples of Argonaute proteins include Thermus thermophilus Argonaute (TtAgo), Pyrococcus furiosus Argonaute (PfAgo), Natronobacterium gregoryi Argonaute (NgAgo) and homologs or modified versions thereof. According to some embodiments, an RNA-guided endonuclease may be a Cas9 or Cpf1 enzyme.

[0296] In an aspect, a site-specific nuclease provided herein is selected from the group consisting of a zinc-finger nuclease, a meganuclease, an RNA-guided nuclease, a TALE-nuclease, a recombinase, a transposase, or any combination thereof. In another aspect, a site-specific nuclease provided herein is selected from the group consisting of a Cas9 or a Cpf1. In another aspect, a site-specific nuclease provided herein is selected from the group consisting of a Cas1, a CasIB, a Cas2, a Cas3, a Cas4, a Cas5, a Cas6, a Cas7, a Cas8, a Cas9, a Cas10, a Csy1, a Csy2, a Csy3, a Cse1, a Cse2, a Csc1, a Csc2, a Csa5, a Csn2, a Csm2, a Csm3, a Csm4, a Csm5, a Csm6, a Cmr1, a Cmr3, a Cmr4, a Cmr5, a Cmr6, a Csb1, a Csb2, a Csb3, a Csx17, a Csx14, a Csx10, a Csx16, a CsaX, a Csx3, a Csx1, a Csx15, a Csf1, a Csf2, a Csf3, a Csf4, a Cpf1, CasX, CasY, a homolog thereof, or a modified version thereof. In another aspect, an RNA-guided nuclease provided herein is selected from the group consisting of a Cas9 or a Cpf1. In another aspect, an RNA guided nuclease provided herein is selected from the group consisting of a Cas1, a Cas1B, a Cas2, a Cas3, a Cas4, a Cas5, a Cas6, a Cas7, a Cas8, a Cas9, a Cas10, a Csy1, a Csy2, a Csy3, a Cse1, a Cse2, a Csc1, a Csc2, a Csa5, a Csn2, a Csm2, a Csm3, a Csm4, a Csm5, a Csm6, a Cmr1, a Cmr3, a Cmr4, a Cmr5, a Cmr6, a Csb1, a Csb2, a Csb3, a Csx17, a Csx14, a Csx10, a Csx16, a CsaX, a Csx3, a Csx1, a Csx15, a Csf1, a Csf2, a Csf3, a Csf4, a Cpf1, CasX, CasY, a homolog thereof, or a modified version thereof. In another aspect, a method and/or a composition provided herein comprises at least one, at least two, at least three, at least four, at least five, at least six, at least seven, at least eight, at least nine, or at least ten site-specific nucleases. In yet another aspect, a method and/or a composition provided herein comprises at least one, at least two, at least three, at least four, at least five, at least six, at least seven, at least eight, at least nine, or at least ten polynucleotides encoding at least one, at least two, at least three, at least four, at least five, at least six, at least seven, at least eight, at least nine, or at least ten site-specific nucleases.

[0297] For RNA-guided endonucleases, a guide RNA (gRNA) molecule is further provided to direct the endonuclease to a target site in the genome of the plant via base-pairing or hybridization to cause a DSB or nick at or near the target site. The gRNA may be transformed or introduced into a plant cell or tissue (perhaps along with a nuclease, or nuclease-encoding DNA molecule, construct or vector) as a gRNA molecule, or as a recombinant DNA molecule, construct or vector comprising a polynucleotide or transcribable DNA sequence encoding the guide RNA operably linked to a plant-expressible promoter. As understood in the art, a “guide RNA” may comprise, for example, a CRISPR RNA (crRNA), a single-chain guide RNA (sgRNA), or any other RNA molecule that may guide or direct an endonuclease to a specific target site in the genome. A “single-chain guide RNA” (or “sgRNA”) is a RNA molecule comprising a crRNA covalently linked a tracrRNA by a linker sequence, which may be expressed as a single RNA transcript or molecule. The guide RNA comprises a guide or targeting sequence that is identical or complementary to a target site within the plant genome, such as at or near a GA oxidase gene. A protospacer-adjacent motif (PAM) may be present in the genome immediately adjacent and upstream to the 5′ end of the genomic target site sequence complementary to the targeting sequence of the guide RNA—i.e., immediately downstream (3′) to the sense (+) strand of the genomic target site (relative to the targeting sequence of the guide RNA) as known in the art. See, e.g., Wu, X. et al., “Target specificity of the CRISPR-Cas9 system,” Quant Biol. 2(2): 59-70 (2014), the content and disclosure of which is incorporated herein by reference. The genomic PAM sequence on the sense (+) strand adjacent to the target site (relative to the targeting sequence of the guide RNA) may comprise 5′-NGG-3′. However, the corresponding sequence of the guide RNA (i.e., immediately downstream (3′) to the targeting sequence of the guide RNA) may generally not be complementary to the genomic PAM sequence. The guide RNA may typically be a non-coding RNA molecule that does not encode a protein. The guide sequence of the guide RNA may be at least 10 nucleotides in length, such as 12-40 nucleotides, 12-30 nucleotides, 12-20 nucleotides, 12-35 nucleotides, 12-30 nucleotides, 15-30 nucleotides, 17-30 nucleotides, or 17-25 nucleotides in length, or about 12, 13, 14, 15, 16, 17, 18, 19, 20, 21, 22, 23, 24, 25 or more nucleotides in length. The guide sequence may be at least 95%, at least 96%, at least 97%, at least 99% or 100% identical or complementary to at least 10, at least 11, at least 12, at least 13, at least 14, at least 15, at least 16, at least 17, at least 18, at least 19, at least 20, at least 21, at least 22, at least 23, at least 24, at least 25, or more consecutive nucleotides of a DNA sequence at the genomic target site. As used herein, the term “consecutive” in reference to a polynucleotide or protein sequence means without deletions or gaps in the sequence.

[0298] In addition to the guide sequence, a guide RNA may further comprise one or more other structural or scaffold sequence(s), which may bind or interact with an RNA-guided endonuclease. Such scaffold or structural sequences may further interact with other RNA molecules (e.g., tracrRNA). Methods and techniques for designing targeting constructs and guide RNAs for genome editing and site-directed integration at a target site within the genome of a plant using an RNA-guided endonuclease are known in the art.

[0299] According to some embodiments, recombinant DNA molecules, constructs and vectors are provided comprising a polynucleotide or transcribable DNA sequence encoding a site-specific nuclease, such as a zinc-finger nuclease (ZFN), a meganuclease, an RNA-guided endonuclease, a TALE-endonuclease (TALEN), a recombinase, or a transposase, wherein the coding sequence is operably linked to a plant expressible promoter. For RNA-guided endonucleases, recombinant DNA molecules, constructs and vectors are further provided comprising a polynucleotide or transcribable DNA sequence encoding a guide RNA, wherein the guide RNA comprises a guide sequence of sufficient length having a percent identity or complementarity to a target site within the genome of a plant. According to some embodiments, recombinant DNA molecules, constructs and vectors are provided comprising a first polynucleotide or transcribable DNA sequence encoding a site-specific nuclease and a second polynucleotide or transcribable DNA sequence encoding one or more gRNAs. According to some embodiments, each polynucleotide or transcribable DNA sequence of a recombinant DNA molecule, construct and vector that encodes a site-specific nuclease and/or a guide RNA may be operably linked to a plant expressible promoter, such as an inducible promoter, a constitutive promoter, a tissue-specific promoter, etc.

[0300] According to some embodiments, a recombinant DNA molecule, construct or vector may comprise a first polynucleotide sequence encoding a site-specific nuclease and a second polynucleotide sequence encoding a guide RNA that may be introduced into a plant cell together via plant transformation techniques. Alternatively, two recombinant DNA molecules, constructs or vectors may be provided including a first recombinant DNA molecule, construct or vector and a second DNA molecule, construct or vector that may be introduced into a plant cell together or sequentially via plant transformation techniques, wherein the first recombinant DNA molecule, construct or vector comprises a polynucleotide sequence encoding a site-specific nuclease and the second recombinant DNA molecule, construct or vector comprises a polynucleotide sequence encoding a guide RNA. According to some embodiments, a recombinant DNA molecule, construct or vector comprising a polynucleotide sequence encoding a site-specific nuclease may be introduced via plant transformation techniques into a plant cell that already comprises (or is transformed with) a recombinant DNA construct or vector comprising a polynucleotide sequence encoding a guide RNA. Alternatively, a recombinant DNA molecule, construct or vector comprising a polynucleotide sequence encoding a guide RNA may be introduced via plant transformation techniques into a plant cell that already comprises (or is transformed with) a recombinant DNA construct or vector comprising a polynucleotide sequence encoding a site-specific nuclease. According to yet further embodiments, a first plant comprising (or transformed with) a recombinant DNA construct or vector comprising a polynucleotide sequence encoding a site-specific nuclease may be crossed with a second plant comprising (or transformed with) a recombinant DNA construct or vector comprising a polynucleotide sequence encoding a guide RNA. Such recombinant DNA molecules, constructs or vectors may be transiently transformed into a plant cell or stably transformed or more preferably integrated into the genome of a plant cell.

[0301] In an aspect, molecules or vectors comprising polynucleotides encoding a site-specific nuclease, and optionally one or more, two or more, three or more, or four or more gRNAs are provided to a plant cell by transformation methods known in the art (e.g., without being limiting, particle bombardment, PEG-mediated protoplast transfection or Agrobacterium-mediated transformation). In an aspect, molecules or vectors comprising polynucleotides encoding a Cas9 nuclease, and optionally one or more, two or more, three or more, or four or more gRNAs are provided to a plant cell by transformation methods known in the art (e.g., without being limiting, particle bombardment, PEG-mediated protoplast transfection or Agrobacterium-mediated transformation). In another aspect, vectors comprising polynucleotides encoding a Cpf1 and, optionally one or more, two or more, three or more, or four or more crRNAs are provided to a cell by transformation methods known in the art (e.g., without being limiting, viral transfection, particle bombardment, PEG-mediated protoplast transfection or Agrobacterium-mediated transformation).

[0302] Several site-specific nucleases, such as recombinases, zinc finger nucleases (ZFNs), meganucleases, and TALENs, are not RNA-guided and instead rely on their protein structure to determine their target site for causing the DSB or nick, or they are fused, tethered or attached to a DNA-binding protein domain or motif. The protein structure of the site-specific nuclease (or the fused/attached/tethered DNA binding domain) may target the site-specific nuclease to the target site. According to many of these embodiments, non-RNA-guided site-specific nucleases, such as recombinases, zinc finger nucleases (ZFNs), meganucleases, and TALENs, may be designed, engineered and constructed according to known methods to target and bind to a target site in the genome of a plant, to create a DSB or nick at such genomic target site or locus for integration of a recombinant DNA construct, expression cassette or transgene encoding a GA2 oxidase into the genomic target site or locus. For example, an engineered site-specific nuclease, such as a recombinase, zinc finger nuclease (ZFN), meganuclease, or TALEN, may be designed to target and bind to a genomic target site within the genome of a plant to create a DSB or nick at the genomic target site for integration of a recombinant DNA construct, expression cassette or transgene encoding a GA2 oxidase, wherein such recombinant DNA construct, expression cassette or transgene encoding a GA2 oxidase is provided within an insertion sequence of a donor molecule or template.

[0303] In an aspect, a targeted genome editing technique described herein may comprise the use of a zinc finger nuclease (ZFN). ZFNs are synthetic proteins consisting of an engineered zinc finger DNA-binding domain fused to a cleavage domain (or a cleavage half-domain), which may be derived from a restriction endonuclease (e.g., FokI). The DNA binding domain may be canonical (C2H2) or non-canonical (e.g., C3H or C4). The DNA-binding domain can comprise one or more zinc fingers (e.g., 2, 3, 4, 5, 6, 7, 8, 9 or more zinc fingers) depending on the target site. Multiple zinc fingers in a DNA-binding domain may be separated by linker sequence(s). ZFNs can be designed to cleave almost any stretch of double-stranded DNA by modification of the zinc finger DNA-binding domain. ZFNs form dimers from monomers composed of a non-specific DNA cleavage domain (e.g., derived from the FokI nuclease) fused to a DNA-binding domain comprising a zinc finger array engineered to bind a target site DNA sequence. The DNA-binding domain of a ZFN may typically be composed of 3-4 (or more) zinc-fingers. The amino acids at positions −1, +2, +3, and +6 relative to the start of the zinc finger α-helix, which contribute to site-specific binding to the target site, can be changed and customized to fit specific target sequences. The other amino acids may form a consensus backbone to generate ZFNs with different sequence specificities. Methods and rules for designing ZFNs for targeting and binding to specific target sequences are known in the art. See, e.g., US Patent App. Nos. 2005/0064474, 2009/0117617, and 2012/0142062, the contents and disclosures of which are incorporated herein by reference. The FokInuclease domain may require dimerization to cleave DNA and therefore two ZFNs with their C-terminal regions are needed to bind opposite DNA strands of the cleavage site (separated by 5-7 bp). The ZFN monomer can cut the target site if the two-ZF-binding sites are palindromic. A ZFN, as used herein, is broad and includes a monomeric ZFN that can cleave double stranded DNA without assistance from another ZFN. The term ZFN may also be used to refer to one or both members of a pair of ZFNs that are engineered to work together to cleave DNA at the same site.

[0304] Without being limited by any scientific theory, because the DNA-binding specificities of zinc finger domains can be re-engineered using one of various methods, customized ZFNs can theoretically be constructed to target nearly any target sequence (e.g., at or near a GA oxidase gene in a plant genome). Publicly available methods for engineering zinc finger domains include Context-dependent Assembly (CoDA), Oligomerized Pool Engineering (OPEN), and Modular Assembly. In an aspect, a method and/or composition provided herein comprises one or more, two or more, three or more, four or more, or five or more ZFNs. In another aspect, a ZFN provided herein is capable of generating a targeted DSB or nick. In an aspect, vectors comprising polynucleotides encoding one or more, two or more, three or more, four or more, or five or more ZFNs are provided to a cell by transformation methods known in the art (e.g., without being limiting, viral transfection, particle bombardment, PEG-mediated protoplast transfection, or Agrobacterium-mediated transformation). The ZFNs may be introduced as ZFN proteins, as polynucleotides encoding ZFN proteins, and/or as combinations of proteins and protein-encoding polynucleotides.

[0305] In an aspect, a targeted genome editing technique described herein may comprise the use of a meganuclease. Meganucleases, which are commonly identified in microbes, such as the LAGLIDADG family of homing endonucleases, are unique enzymes with high activity and long recognition sequences (>14 bp) resulting in site-specific digestion of target DNA. Engineered versions of naturally occurring meganucleases typically have extended DNA recognition sequences (for example, 14 to 40 bp). According to some embodiments, a meganuclease may comprise a scaffold or base enzyme selected from the group consisting of I-CreI, I-CeuI, I-MsoI, I-SceI, I-AniI, and I-DmoI. The engineering of meganucleases can be more challenging than ZFNs and TALENs because the DNA recognition and cleavage functions of meganucleases are intertwined in a single domain. Specialized methods of mutagenesis and high-throughput screening have been used to create novel meganuclease variants that recognize unique sequences and possess improved nuclease activity. Thus, a meganuclease may be selected or engineered to bind to a genomic target sequence in a plant, such as at or near the genomic locus of a GA oxidase gene. In an aspect, a method and/or composition provided herein comprises one or more, two or more, three or more, four or more, or five or more meganucleases. In another aspect, a meganuclease provided herein is capable of generating a targeted DSB. In an aspect, vectors comprising polynucleotides encoding one or more, two or more, three or more, four or more, or five or more meganucleases are provided to a cell by transformation methods known in the art (e.g., without being limiting, viral transfection, particle bombardment, PEG-mediated protoplast transfection or Agrobacterium-mediated transformation).

[0306] In an aspect, a targeted genome editing technique described herein may comprise the use of a transcription activator-like effector nuclease (TALEN). TALENs are artificial restriction enzymes generated by fusing the transcription activator-like effector (TALE) DNA binding domain to a nuclease domain (e.g., FokI). In some aspects, the nuclease is selected from a group consisting of PvuII, MutH, TevI, FokI, AlwI, MlyI, SbfI, SdaI, StsI, CleDORF, Clo051, and Pept071. For FokI nuclease, when each member of a TALEN pair binds to the DNA sites flanking a target site, the FokI monomers dimerize and cause a double-stranded DNA break at the target site. Besides the wild-type FokI cleavage domain, variants of the FokI cleavage domain with mutations have been designed to improve cleavage specificity and cleavage activity. The FokI domain functions as a dimer, requiring two constructs with unique DNA binding domains for sites in the target genome with proper orientation and spacing. Both the number of amino acid residues between the TALEN DNA binding domain and the FokI cleavage domain and the number of bases between the two individual TALEN binding sites are parameters for achieving high levels of activity. The term TALEN, as used herein, is broad and includes a monomeric TALEN that can cleave double stranded DNA without assistance from another TALEN. The term TALEN is also refers to one or both members of a pair of TALENs that work together to cleave DNA at the same site.

[0307] Besides the wild-type FokI cleavage domain, variants of the FokI cleavage domain with mutations have been designed to improve cleavage specificity and cleavage activity. The FokI domain functions as a dimer, requiring two constructs with unique DNA binding domains for sites in the target genome with proper orientation and spacing. Both the number of amino acid residues between the TALEN DNA binding domain and the FokI cleavage domain and the number of bases between the two individual TALEN binding sites are parameters for achieving high levels of activity. PvuII, MutH, and TevI cleavage domains are useful alternatives to FokI and FokI variants for use with TALEs. PvuII functions as a highly specific cleavage domain when coupled to a TALE (see Yank et al. 2013. PLoS One. 8: e82539). MutH is capable of introducing strand-specific nicks in DNA (see Gabsalilow et al. 2013. Nucleic Acids Research. 41: e83). TevI introduces double-stranded breaks in DNA at targeted sites (see Beurdeley et al., 2013. Nature Communications. 4: 1762).

[0308] Transcription activator-like effectors (TALEs) can be engineered to bind practically any DNA sequence, such as at or near the genomic locus of a GA oxidase gene in a plant. TALE has a central DNA-binding domain composed of 13-28 repeat monomers of 33-34 amino acids. The amino acids of each monomer are highly conserved, except for hypervariable amino acid residues at positions 12 and 13. The two variable amino acids are called repeat-variable diresidues (RVDs). The amino acid pairs NI, NG, HD, and NN of RVDs preferentially recognize adenine, thymine, cytosine, and guanine/adenine, respectively, and modulation of RVDs can recognize consecutive DNA bases. This simple relationship between amino acid sequence and DNA recognition has allowed for the engineering of specific DNA binding domains by selecting a combination of repeat segments containing the appropriate RVDs. The relationship between amino acid sequence and DNA recognition of the TALE binding domain allows for designable proteins. Software programs such as DNA Works can be used to design TALE constructs. Other methods of designing TALE constructs are known to those of skill in the art. See Doyle et al., Nucleic Acids Research (2012) 40: W117-122.; Cermak et al., Nucleic Acids Research (2011). 39:e82; and tale-nt.cac.cornell.edu/about. In an aspect, a method and/or composition provided herein comprises one or more, two or more, three or more, four or more, or five or more TALENs. In another aspect, a TALEN provided herein is capable of generating a targeted DSB. In an aspect, vectors comprising polynucleotides encoding one or more, two or more, three or more, four or more, or five or more TALENs are provided to a cell by transformation methods known in the art (e.g., without being limiting, viral transfection, particle bombardment, PEG-mediated protoplast transfection or Agrobacterium-mediated transformation). See, e.g., US Patent App. Nos. 2011/0145940, 2011/0301073, and 2013/0117869, the contents and disclosures of which are incorporated herein by reference.

[0309] In an aspect, a targeted genome editing technique described herein may comprise the use of a recombinase. In some embodiments, a tyrosine recombinase attached, etc., to a DNA recognition domain or motif may be selected from the group consisting of a Cre recombinase, a Flp recombinase, and a Tnp1 recombinase. In an aspect, a Cre recombinase or a Gin recombinase provided herein may be tethered to a zinc-finger DNA binding domain. The Flp-FRT site-directed recombination system may come from the 2p plasmid from the baker's yeast Saccharomyces cerevisiae. In this system, Flp recombinase (flippase) may recombine sequences between flippase recognition target (FRT) sites. FRT sites comprise 34 nucleotides. Flp may bind to the “arms” of the FRT sites (one arm is in reverse orientation) and cleaves the FRT site at either end of an intervening nucleic acid sequence. After cleavage, Flp may recombine nucleic acid sequences between two FRT sites. Cre-lox is a site-directed recombination system derived from the bacteriophage P1 that is similar to the Flp-FRT recombination system. Cre-lox can be used to invert a nucleic acid sequence, delete a nucleic acid sequence, or translocate a nucleic acid sequence. In this system, Cre recombinase may recombine a pair of lox nucleic acid sequences. Lox sites comprise 34 nucleotides, with the first and last 13 nucleotides (arms) being palindromic. During recombination, Cre recombinase protein binds to two lox sites on different nucleic acids and cleaves at the lox sites. The cleaved nucleic acids are spliced together (reciprocally translocated) and recombination is complete. In another aspect, a lox site provided herein is a loxP, lox 2272, loxN, lox 511, lox 5171, lox71, lox66, M2, M3, M7, or M11 site.

[0310] According to another aspect of the present disclosure, a transgenic plant(s), plant cell(s), seed(s), and plant part(s) are provided comprising a transformation event or insertion into the genome of at least one plant cell thereof, wherein the transformation event or insertion comprises a recombinant DNA sequence, construct or expression cassette comprising a transcribable DNA sequence encoding a GA2 oxidase, wherein the transcribable DNA sequence is operably linked to a plant-expressible promoter, such as a constitutive, vascular and/or leaf promoter. Such a transgenic plant may be produced by any suitable transformation method as provided above, to produce a transgenic R₀ plant, which may then be selfed or crossed to other plants to generate R₁ seed and subsequent progeny generations and seed through additional crosses, etc. Embodiments of the present disclosure further include a plant cell, tissue, explant, plant part, etc., comprising one or more transgenic cells having a transformation event or genomic insertion of a recombinant DNA or polynucleotide sequence comprising a transcribable DNA sequence encoding a GA2 oxidase mRNA and protein.

[0311] Transgenic plants, plant cells, seeds, and plant parts of the present disclosure may be homozygous or hemizygous for a transgenic event or insertion of an expression cassette or transcribable DNA sequence encoding a GA2 oxidase, and plants, plant cells, seeds, and plant parts of the present embodiments may contain any number of copies of such transgenic event(s) and/or insertion(s). The dosage or amount of expression of a transgene or transcribable DNA sequence may be altered by its copy number and the combination of transgenes or transcribable DNA sequences, which may affect the degree or extent of phenotypic changes in the transgenic plant, etc. Transgenic plants provided herein may corn plants already having increased yield and/or lodging resistance due to prior breeding efforts and mutations of the GA pathway in these plants. Advantages of using a transgene or transcribable DNA sequence to ectopically express a GA2 oxidase gene is not only the ability to limit expression in a tissue-specific or tissue-preferred manner, but also the potential dominance (e.g., dominant negative effects) of a single or hemizygous copy of the transcribable DNA sequence to cause the beneficial short-stature, semi-dwarf traits or phenotypes in crop plants. Thus, recombinant DNA molecules or constructs of the present disclosure may be used to create beneficial traits in corn plants without off-types using only a single copy of the transgenic event, insertion or construct. Unlike previously described mutations or alleles in the GA pathway that are recessive and require plants to be homozygous for the mutant allele, plants transformed with a GA2 oxidase transgene of the present disclosure may improve traits, yield and crop breeding efforts by facilitating the production of hybrid corn plants since they only require a single or hemizygous copy of the transgene.

[0312] According to some embodiments, a transgenic or modified corn plant comprising a GA2 oxidase transgene may be characterized as having one or more beneficial traits, such as a shorter stature or semi-dwarf plant height, reduced internode length, increased stalk/stem diameter, improved lodging resistance, reduced green snap, deeper roots, increased leaf area, earlier canopy closure, increased foliar water content and/or higher stomatal conductance under water limiting conditions, reduced anthocyanin content and/or area in leaves under normal or nitrogen or water limiting stress conditions, improved yield-related traits including a larger female reproductive organ or ear, an increase in ear weight, harvest index, yield, seed or kernel number, and/or seed or kernel weight, relative to a wild type or control plant. Such a transgenic corn plant may further have increased stress tolerance, such as increased drought tolerance, nitrogen utilization, and/or tolerance to high density planting.

[0313] For purposes of the present disclosure, a “plant” includes an explant, plant part, seedling, plantlet or whole plant at any stage of regeneration or development. As used herein, a “transgenic plant” refers to a plant whose genome has been altered by the integration or insertion of a recombinant DNA molecule, construct or sequence. A transgenic plant includes an R₀ plant developed or regenerated from an originally transformed plant cell(s) as well as progeny transgenic plants in later generations or crosses from the R₀ transgenic plant. As used herein, a “plant part” refers to any organ or intact tissue of a plant, such as a meristem, shoot organ/structure (e.g., leaf, stem or node), root, flower or floral organ/structure (e.g., bract, sepal, petal, stamen, carpel, anther and ovule), seed (e.g., embryo, endosperm, and seed coat), fruit (e.g., the mature ovary), propagule, or other plant tissues (e.g., vascular tissue, dermal tissue, ground tissue, and the like), or any portion thereof. Plant parts of the present disclosure may be viable, nonviable, regenerable, and/or non-regenerable. A “propagule” may include any plant part that can grow into an entire plant.

[0314] According to present embodiments, a plant cell transformed with a construct or molecule comprising a transcribable DNA sequence encoding a GA2 oxidase may include any plant cell that is competent for transformation as understood in the art based on the method of transformation, such as a meristem cell, an embryonic cell, a callus cell, etc. As used herein, a “transgenic plant cell” simply refers to any plant cell that is transformed with a stably-integrated recombinant DNA molecule, construct or sequence. A transgenic plant cell may include an originally-transformed plant cell, a transgenic plant cell of a regenerated or developed R₀ plant, a transgenic plant cell cultured from another transgenic plant cell, or a transgenic plant cell from any progeny plant or offspring of the transformed R₀ plant, including cell(s) of a plant seed or embryo, or a cultured plant cell, callus cell, etc.

[0315] Methods and techniques are provided for screening for, and/or identifying, cells or plants, etc., for the presence of targeted edits or transgenes, and selecting cells or plants comprising targeted edits or transgenes, which may be based on one or more phenotypes or traits, or on the presence or absence of a molecular marker or polynucleotide or protein sequence in the cells or plants. Embodiments of the present disclosure include methods for making or producing transgenic or modified plants, such as by transformation, site-directed integration, crossing, etc., wherein the method comprises introducing a recombinant DNA molecule, construct or sequence comprising a GA2 oxidase transgene into a plant cell, and then regenerating or developing the transgenic or modified plant from the transformed plant cell, which may be performed under selection pressure favoring a transgenic event. Such methods may comprise transforming a plant cell with a recombinant DNA molecule, construct or sequence comprising the transcribable DNA sequence, and selecting for a plant having one or more altered phenotypes or traits, such as one or more of the following traits at one or more stages of development: shorter or semi-dwarf stature or plant height, shorter internode length in one or more internode(s), increased stalk/stem diameter, improved lodging resistance, reduced green snap, deeper roots, increased leaf area, earlier canopy closure, increased foliar water content and/or higher stomatal conductance under water limiting conditions, reduced anthocyanin content and/or area in leaves under normal or nitrogen or water limiting stress conditions, improved yield-related traits including a larger female reproductive organ or ear, an increase in ear weight, harvest index, yield, seed or kernel number, and/or seed or kernel weight, increased stress tolerance, such as increased drought tolerance, increased nitrogen utilization, and/or increased tolerance to high density planting, as compared to a wild type or control plant. Alternatively or additionally, such methods may comprise transforming a plant cell with a recombinant DNA molecule, construct or sequence comprising the transcribable DNA sequence, and selecting for a plant having the recombinant DNA molecule, construct or sequence according to any molecular biology techniques known in the art.

[0316] Nucleic acids can be isolated and detected using techniques known in the art. For example, nucleic acids can be isolated and detected using, without limitation, recombinant nucleic acid technology, and/or the polymerase chain reaction (PCR). General PCR techniques are described, for example in PCR Primer: A Laboratory Manual, Dieffenbach & Dveksler, Eds., Cold Spring Harbor Laboratory Press, 1995. Recombinant nucleic acid techniques include, for example, restriction enzyme digestion and ligation, which can be used to isolate a nucleic acid. Isolated nucleic acids also can be chemically synthesized, either as a single nucleic acid molecule or as a series of oligonucleotides. Polypeptides can be purified from natural sources (e.g., a biological sample) by known methods such as DEAE ion exchange, gel filtration, and hydroxyapatite chromatography. A polypeptide also can be purified, for example, by expressing a nucleic acid in an expression vector. In addition, a purified polypeptide can be obtained by chemical synthesis. The extent of purity of a polypeptide can be measured using any appropriate method, e.g., column chromatography, polyacrylamide gel electrophoresis, or HPLC analysis. Any method known in the art may be used to screen for, and/or identify, cells, plants, etc., having a transgene or genome edit in its genome, which may be based on any suitable form of visual observation, selection, molecular technique, etc.

[0317] In some embodiments, methods are provided for detecting recombinant nucleic acids and/or polypeptides in plant cells. For example, nucleic acids may be detected using hybridization probes or through production of amplicons using PCR with primers as known in the art. Hybridization between nucleic acids is discussed in Sambrook et al. (1989, Molecular Cloning: A Laboratory Manual, 2nd Ed., Cold Spring Harbor Laboratory Press, Cold Spring Harbor, NY). Polypeptides can be detected using antibodies. Techniques for detecting polypeptides using antibodies include enzyme linked immunosorbent assays (ELISAs), Western blots, immunoprecipitations, immunofluorescence, and the like. An antibody provided herein may be a polyclonal antibody or a monoclonal antibody. An antibody having specific binding affinity for a polypeptide provided herein can be generated using methods known in the art. An antibody or hybridization probe may be attached to a solid support, such as a tube, plate or well, using methods known in the art. Detection (e.g., of an amplification product, of a hybridization complex, of a polypeptide) can be accomplished using detectable labels that may be attached or associated with a hybridization probe or antibody. The term “label” is intended to encompass the use of direct labels as well as indirect labels. Detectable labels include enzymes, prosthetic groups, fluorescent materials, luminescent materials, bioluminescent materials, and radioactive materials.

[0318] The screening and selection of modified, edited or transgenic plants or plant cells can be through any methodologies known to those skilled in the art of molecular biology. Examples of screening and selection methodologies include, but are not limited to, Southern analysis, PCR amplification for detection of a polynucleotide, Northern blots, RNase protection, primer-extension, RT-PCR amplification for detecting RNA transcripts, Sanger sequencing, Next Generation sequencing technologies (e.g., Illumina®, PacBio®, Ion TorrentTM, etc.) enzymatic assays for detecting enzyme or ribozyme activity of polypeptides and polynucleotides, and protein gel electrophoresis, Western blots, immunoprecipitation, and enzyme-linked immunoassays to detect polypeptides. Other techniques such as in situ hybridization, enzyme staining, and immunostaining also can be used to detect the presence or expression of polypeptides and/or polynucleotides. Methods for performing all of the referenced techniques are known in the art.

[0319] According to another aspect of the present disclosure, methods are provided for planting a modified or transgenic plant(s) provided herein at a normal/standard or high density in field. According to some embodiments, the yield of a crop plant per acre (or per land area) may be increased by planting a modified or transgenic plant(s) of the present disclosure at a higher density in the field. As described herein, modified or transgenic plants expressing a transcribable DNA sequence that encodes a GA2 oxidase may have reduced plant height, shorter internode(s), increased stalk/stem diameter, and/or increased lodging resistance. It is proposed that modified or transgenic plants may tolerate high density planting conditions since an increase in stem diameter may resist lodging and the shorter plant height may allow for increased light penetrance to the lower leaves under high density planting conditions. Thus, modified or transgenic plants provided herein may be planted at a higher density to increase the yield per acre (or land area) in the field. For row crops, higher density may be achieved by planting a greater number of seeds/plants per row length and/or by decreasing the spacing between rows.

[0320] According to some embodiments, a modified or transgenic crop plant may be planted at a density in the field (plants per land/field area) that is at least 5%, 10%, 15%, 20%, 25%, 50%, 75%, 100%, 125%, 150%, 175%, 200%, 225%, or 250% higher than the normal planting density for that crop plant according to standard agronomic practices. A modified or transgenic crop plant may be planted at a density in the field of at least 38,000 plants per acre, at least 40,000 plants per acre, at least 42,000 plants per acre, at least 44,000 plants per acre, at least 45,000 plants per acre, at least 46,000 plants per acre, at least 48,000 plants per acre, 50,000 plants per acre, at least 52,000 plants per acre, at least 54,000 per acre, or at least 56,000 plants per acre. As an example, corn plants may be planted at a higher density, such as in a range from about 38,000 plants per acre to about 60,000 plants per acre, or about 40,000 plants per acre to about 58,000 plants per acre, or about 42,000 plants per acre to about 58,000 plants per acre, or about 40,000 plants per acre to about 45,000 plants per acre, or about 45,000 plants per acre to about 50,000 plants per acre, or about 50,000 plants per acre to about 58,000 plants per acre, or about 52,000 plants per acre to about 56,000 plants per acre, or about 38,000 plants per acre, about 42,000 plant per acre, about 46,000 plant per acre, or about 48,000 plants per acre, about 50,000 plants per acre, or about 52,000 plants per acre, or about 54,000 plant per acre, as opposed to a standard density range, such as about 18,000 plants per acre to about 38,000 plants per acre.

[0321] According to embodiments of the present disclosure, a modified corn plant(s) is/are provided that comprise (i) a plant height of less than 2000 mm, less than 1950 mm, less than 1900 mm, less than 1850 mm, less than 1800 mm, less than 1750 mm, less than 1700 mm, less than 1650 mm, less than 1600 mm, less than 1550 mm, less than 1500 mm, less than 1450 mm, less than 1400 mm, less than 1350 mm, less than 1300 mm, less than 1250 mm, less than 1200 mm, less than 1150 mm, less than 1100 mm, less than 1050 mm, or less than 1000 mm, and/or (ii) an average stem or stalk diameter of at least 18 mm, at least 18.5 mm, at least 19 mm, at least 19.5 mm, at least 20 mm, at least 20.5 mm, at least 21 mm, at least 21.5 mm, or at least 22 mm. Stated a different way, a modified corn plant(s) is/are provided that comprise a plant height of less than 2000 mm, less than 1950 mm, less than 1900 mm, less than 1850 mm, less than 1800 mm, less than 1750 mm, less than 1700 mm, less than 1650 mm, less than 1600 mm, less than 1550 mm, less than 1500 mm, less than 1450 mm, less than 1400 mm, less than 1350 mm, less than 1300 mm, less than 1250 mm, less than 1200 mm, less than 1150 mm, less than 1100 mm, less than 1050 mm, or less than 1000 mm, and/or an average stem or stalk diameter that is greater than 18 mm, greater than 18.5 mm, greater than 19 mm, greater than 19.5 mm, greater than 20 mm, greater than 20.5 mm, greater than 21 mm, greater than 21.5 mm, or greater than 22 mm. Any such plant height trait or range that is expressed in millimeters (mm) may be converted into a different unit of measurement based on known conversions (e.g., one inch is equal to 2.54 cm or 25.4 millimeters, and millimeters (mm), centimeters (cm) and meters (m) only differ by one or more powers of ten). Thus, any measurement provided herein is further described in terms of any other comparable units of measurement according to known and established conversions. However, the exact plant height and/or stem diameter of a modified corn plant may depend on the environment and genetic background. Thus, the change in plant height and/or stem diameter of a modified corn plant may instead be described in terms of a minimum difference or percent change relative to a control plant. A modified corn plant may further comprise at least one ear that is substantially free of male reproductive tissues or structures or other off-types.

[0322] According to embodiments of the present disclosure, modified corn plants are provided that comprise a plant height during late vegetative and/or reproductive stages of development (e.g., at R3 stage) of between 1000 mm and 1800 mm, between 1000 mm and 1700 mm, between 1050 mm and 1700 mm, between 1100 mm and 1700 mm, between 1150 mm and 1700 mm, between 1200 mm and 1700 mm, between 1250 mm and 1700 mm, between 1300 mm and 1700 mm, between 1350 mm and 1700 mm, between 1400 mm and 1700 mm, between 1450 mm and 1700 mm, between 1000 mm and 1500 mm, between 1050 mm and 1500 mm, between 1100 mm and 1500 mm, between 1150 mm and 1500 mm, between 1200 mm and 1500 mm, between 1250 mm and 1500 mm, between 1300 mm and 1500 mm, between 1350 mm and 1500 mm, between 1400 mm and 1500 mm, between 1450 mm and 1500 mm, between 1000 mm and 1600 mm, between 1100 mm and 1600 mm, between 1200 mm and 1600 mm, between 1300 mm and 1600 mm, between 1350 mm and 1600 mm, between 1400 mm and 1600 mm, between 1450 mm and 1600 mm, of between 1000 mm and 2000 mm, between 1200 mm and 2000 mm, between 1200 mm and 1800 mm, between 1300 mm and 1700 mm, between 1400 mm and 1700 mm, between 1400 mm and 1600 mm, between 1400 mm and 1700 mm, between 1400 mm and 1800 mm, between 1400 mm and 1900 mm, between 1400 mm and 2000 mm, or between 1200 mm and 2500 mm, and/or an average stem diameter of between 17.5 mm and 22 mm, between 18 mm and 22 mm, between 18.5 and 22 mm, between 19 mm and 22 mm, between 19.5 mm and 22 mm, between 20 mm and 22 mm, between 20.5 mm and 22 mm, between 21 mm and 22 mm, between 21.5 mm and 22 mm, between 17.5 mm and 21 mm, between 17.5 mm and 20 mm, between 17.5 mm and 19 mm, between 17.5 mm and 18 mm, between 18 mm and 21 mm, between 18 mm and 20 mm, or between 18 mm and 19 mm. A modified corn plant may be substantially free of off-types, such as male reproductive tissues or structures in one or more ears of the modified corn plant.

[0323] According to embodiments of the present disclosure, modified corn plants are provided that have (i) a plant height that is at least 5%, at least 10%, at least 15%, at least 20%, at least 25%, at least 30%, at least 35%, at least 40%, at least 45%, at least 50%, at least 55%, at least 60%, at least 65%, at least 70%, or at least 75% less than the height of a wild-type or control plant, and/or (ii) a stem or stalk diameter that is at least 5%, at least 10%, at least 15%, at least 20%, at least 25%, at least 30%, at least 35%, at least 40%, at least 45%, at least 50%, at least 55%, at least 60%, at least 65%, at least 70%, at least 75%, at least 80%, at least 85%, at least 90%, at least 95%, or at least 100% greater than the stem diameter of the wild-type or control plant. According to embodiments of the present disclosure, a modified corn plant may have a reduced plant height that is no more than 20%, 25%, 30%, 35%, 40%, 45%, 50%, 55%, or 60% shorter than the height of a wild-type or control plant, and/or a stem or stalk diameter that is less than (or not more than) 10%, 15%, 20%, 25%, 30%, 35%, 40%, 45%, 50%, 55%, 60%, 65%, 70%, 75%, 80%, 85%, 90%, 95%, or 100% greater than the stem or stalk diameter of a wild-type or control plant. For example, a modified plant may have (i) a plant height that is at least 10%, at least 15%, or at least 20% less or shorter (i.e., greater than or equal to 10%, 15%, or 20% shorter), but not greater or more than 50% shorter, than a wild type or control plant, and/or (ii) a stem or stalk diameter that is that is at least 5%, at least 10%, or at least 15% greater, but not more than 30%, 35%, or 40% greater, than a wild type or control plant. For clarity, the phrases “at least 20% shorter” and “greater than or equal to 20% shorter” would exclude, for example, 10% shorter. Likewise for clarity, the phrases “not greater than 50% shorter”, “no more than 50% shorter” and “not more than 50% shorter” would exclude 60% shorter; the phrase “at least 5% greater” would exclude 2% greater; and the phrases “not more than 30% greater” and “no more than 30% greater” would exclude 40% greater.

[0324] According to embodiments of the present disclosure, modified corn plants are provided that comprise a height between 5% and 75%, between 5% and 50%, between 10% and 70%, between 10% and 65%, between 10% and 60%, between 10% and 55%, between 10% and 50%, between 10% and 45%, between 10% and 40%, between 10% and 35%, between 10% and 30%, between 10% and 25%, between 10% and 20%, between 10% and 15%, between 10% and 10%, between 10% and 75%, between 25% and 75%, between 10% and 50%, between 20% and 50%, between 25% and 50%, between 30% and 75%, between 30% and 50%, between 25% and 50%, between 15% and 50%, between 20% and 50%, between 25% and 45%, or between 30% and 45% less than the height of a wild-type or control plant, and/or a stem or stalk diameter that is between 5% and 100%, between 5% and 95%, between 5% and 90%, between 5% and 85%, between 5% and 80%, between 5% and 75%, between 5% and 70%, between 5% and 65%, between 5% and 60%, between 5% and 55%, between 5% and 50%, between 5% and 45%, between 5% and 40%, between 5% and 35%, between 5% and 30%, between 5% and 25%, between 5% and 20%, between 5% and 15%, between 5% and 10%, between 10% and 100%, between 10% and 75%, between 10% and 50%, between 10% and 40%, between 10% and 30%, between 10% and 20%, between 25% and 75%, between 25% and 50%, between 50% and 75%, between 8% and 20%, or between 8% and 15% greater than the stem or stalk diameter of the wild-type or control plant.

[0325] According to embodiments of the present disclosure, modified corn plants are provided that comprise an average internode length (or a minus-2 internode length and/or minus-4 internode length relative to the position of the ear) that is at least 5%, at least 10%, at least 15%, at least 20%, at least 25%, at least 30%, at least 35%, at least 40%, at least 45%, at least 50%, at least 55%, at least 60%, at least 65%, at least 70%, or at least 75% less than the same or average internode length of a wild-type or control plant. The “minus-2 internode” of a corn plant refers to the second internode below the ear of the plant, and the “minus-4 internode” of a corn plant refers to the fourth internode below the ear of the plant According to many embodiments, modified corn plants are provided that have an average internode length (or a minus-2 internode length and/or minus-4 internode length relative to the position of the ear) that is between 5% and 75%, between 5% and 50%, between 10% and 70%, between 10% and 65%, between 10% and 60%, between 10% and 55%, between 10% and 50%, between 10% and 45%, between 10% and 40%, between 10% and 35%, between 10% and 30%, between 10% and 25%, between 10% and 20%, between 10% and 15%, between 10% and 10%, between 10% and 75%, between 25% and 75%, between 10% and 50%, between 20% and 50%, between 25% and 50%, between 30% and 75%, between 30% and 50%, between 25% and 50%, between 15% and 50%, between 20% and 50%, between 25% and 45%, or between 30% and 45% less than the same or average internode length of a wild-type or control plant.

[0326] According to embodiments of the present disclosure, modified corn plants are provided that comprise an ear weight (individually or on average) that is at least 5%, at least 10%, at least 15%, at least 20%, at least 25%, at least 30%, at least 35%, at least 40%, at least 45%, at least 50%, at least 55%, at least 60%, at least 65%, at least 70%, at least 75%, at least 80%, at least 85%, at least 90%, at least 95%, or at least 100% greater than the ear weight of a wild-type or control plant. A modified corn plant provided herein may comprise an ear weight that is between 5% and 100%, between 5% and 95%, between 5% and 90%, between 5% and 85%, between 5% and 80%, between 5% and 75%, between 5% and 70%, between 5% and 65%, between 5% and 60%, between 5% and 55%, between 5% and 50%, between 5% and 45%, between 5% and 40%, between 5% and 35%, between 5% and 30%, between 5% and 25%, between 5% and 20%, between 5% and 15%, between 5% and 10%, between 10% and 100%, between 10% and 75%, between 10% and 50%, between 25% and 75%, between 25% and 50%, or between 50% and 75% greater than the ear weight of a wild-type or control plant.

[0327] According to embodiments of the present disclosure, modified corn plants are provided that have a harvest index of at least 0.57, at least 0.58, at least 0.59, at least 0.60, at least 0.61, at least 0.62, at least 0.63, at least 0.64, or at least 0.65 (or greater). A modified corn plant may comprise a harvest index of between 0.57 and 0.65, between 0.57 and 0.64, between 0.57 and 0.63, between 0.57 and 0.62, between 0.57 and 0.61, between 0.57 and 0.60, between 0.57 and 0.59, between 0.57 and 0.58, between 0.58 and 0.65, between 0.59 and 0.65, or between 0.60 and 0.65. A modified corn plant may have a harvest index that is at least 1%, at least 2%, at least 3%, at least 4%, at least 5%, at least 6%, at least 7%, at least 8%, at least 9%, at least 10%, at least 11%, at least 12%, at least 13%, at least 14%, at least 15%, at least 20%, at least 25%, at least 30%, at least 35%, at least 40%, at least 45%, or at least 50% greater than the harvest index of a wild-type or control plant. A modified corn plant may have a harvest index that is between 1% and 45%, between 1% and 40%, between 1% and 35%, between 1% and 30%, between 1% and 25%, between 1% and 20%, between 1% and 15%, between 1% and 14%, between 1% and 13%, between 1% and 12%, between 1% and 11%, between 1% and 10%, between 1% and 9%, between 1% and 8%, between 1% and 7%, between 1% and 6%, between 1% and 5%, between 1% and 4%, between 1% and 3%, between 1% and 2%, between 5% and 15%, between 5% and 20%, between 5% and 30%, or between 5% and 40% greater than the harvest index of a wild-type or control plant.

[0328] According to embodiments of the present disclosure, modified corn plants are provided that have an increase in harvestable yield of at least 1 bushel per acre, at least 2 bushels per acre, at least 3 bushels per acre, at least 4 bushels per acre, at least 5 bushels per acre, at least 6 bushels per acre, at least 7 bushels per acre, at least 8 bushels per acre, at least 9 bushels per acre, or at least 10 bushels per acre, relative to a wild-type or control plant. A modified corn plant may have an increase in harvestable yield between 1 and 10, between 1 and 8, between 2 and 8, between 2 and 6, between 2 and 5, between 2.5 and 4.5, or between 3 and 4 bushels per acre. A modified corn plant may have an increase in harvestable yield that is at least 1%, at least 2%, at least 3%, at least 4%, at least 5%, at least 6%, at least 7%, at least 8%, at least 9%, at least 10%, at least 11%, at least 12%, at least 13%, at least 14%, at least 15%, at least 20%, or at least 25% greater than the harvestable yield of a wild-type or control plant. A modified corn plant may have a harvestable yield that is between 1% and 25%, between 1% and 20%, between 1% and 15%, between 1% and 14%, between 1% and 13%, between 1% and 12%, between 1% and 11%, between 1% and 10%, between 1% and 9%, between 1% and 8%, between 1% and 7%, between 1% and 6%, between 1% and 5%, between 1% and 4%, between 1% and 3%, between 1% and 2%, between 5% and 15%, between 5% and 20%, between 5% and 25%, between 2% and 10%, between 2% and 9%, between 2% and 8%, between 2% and 7%, between 2% and 6%, between 2% and 5%, or between 2% and 4% greater than the harvestable yield of a wild-type or control plant.

[0329] According to embodiments of the present disclosure, a modified corn plant is provided that has a lodging frequency that is at least 5%, at least 10%, at least 15%, at least 20%, at least 25%, at least 30%, at least 35%, at least 40%, at least 45%, at least 50%, at least 55%, at least 60%, at least 65%, at least 70%, at least 75%, at least 80%, at least 85%, at least 90%, at least 95%, or 100% less or lower than a wild-type or control plant. A modified corn plant may have a lodging frequency that is between 5% and 100%, between 5% and 95%, between 5% and 90%, between 5% and 85%, between 5% and 80%, between 5% and 75%, between 5% and 70%, between 5% and 65%, between 5% and 60%, between 5% and 55%, between 5% and 50%, between 5% and 45%, between 5% and 40%, between 5% and 35%, between 5% and 30%, between 5% and 25%, between 5% and 20%, between 5% and 15%, between 5% and 10%, between 10% and 100%, between 10% and 75%, between 10% and 50%, between 10% and 40%, between 10% and 30%, between 10% and 20%, between 25% and 75%, between 25% and 50%, or between 50% and 75% less or lower than a wild-type or control plant. Further provided are populations of corn plants having increased lodging resistance and a reduced lodging frequency. Populations of modified corn plants are provided having a lodging frequency that is at least 5%, at least 10%, at least 15%, at least 20%, at least 25%, at least 30%, at least 35%, at least 40%, at least 45%, at least 50%, at least 55%, at least 60%, at least 65%, at least 70%, at least 75%, at least 80%, at least 85%, at least 90%, at least 95%, or 100% less or lower than a population of wild-type or control plants. A population of modified corn plants may comprise a lodging frequency that is between 5% and 100%, between 5% and 95%, between 5% and 90%, between 5% and 85%, between 5% and 80%, between 5% and 75%, between 5% and 70%, between 5% and 65%, between 5% and 60%, between 5% and 55%, between 5% and 50%, between 5% and 45%, between 5% and 40%, between 5% and 35%, between 5% and 30%, between 5% and 25%, between 5% and 20%, between 5% and 15%, between 5% and 10%, between 10% and 100%, between 10% and 75%, between 10% and 50%, between 10% and 40%, between 10% and 30%, between 10% and 20%, between 25% and 75%, between 25% and 50%, or between 50% and 75% less or lower than a population of wild-type or control plants, which may be expressed as an average over a specified number of plants or crop area of equal density.

[0330] According to embodiments of the present disclosure, modified corn plants are provided having a significantly reduced or decreased plant height (e.g., 2000 mm or less) and/or a significantly increased stem diameter (e.g., 18 mm or more), relative to a wild-type or control plant. According to these embodiments, the decrease or reduction in plant height and/or increase in stem diameter may be within any of the height, diameter or percentage ranges recited herein. Such modified corn plants having a reduced plant height and/or increased stem diameter relative to a wild-type or control plant may be transformed with a transcribable DNA sequence encoding a GA2 oxidase mRNA and protein. Modified corn plants having a significantly reduced plant height and/or a significantly increased stem diameter relative to a wild-type or control plant may further have at least one ear that is substantially free of male reproductive tissues or structures and/or other off-types. Modified corn plants having a significantly reduced plant height and/or an increased stem diameter relative to a wild-type or control plant may have ectopic expression of a GA2 oxidase mRNA and/or protein in one or more tissue(s) of the plant, such as one or more vascular and/or leaf tissue(s) of the plant, relative to the same tissue(s) of the wild-type or control plant. According to many embodiments, modified corn plants may comprise at least one polynucleotide or transcribable DNA sequence encoding a GA2 oxidase operably linked to a plant-expressible promoter as provided herein, which may be a constitutive, tissue-specific or tissue-preferred promoter. According to some embodiments, modified corn plants having a significantly reduced plant height and/or an increased stem diameter relative to a wild-type or control plant may further have an increased harvest index and/or increased lodging resistance relative to the wild-type or control plant. Such modified corn plants may be substantially free of off-types, such as male reproductive tissues or structures and/or other off-types in at least one ear of the modified plants.

[0331] According to embodiments of the present disclosure, a population of modified corn plants are provided, wherein the population of modified corn plants have an average plant height that is significantly less, and/or an average stem or stalk diameter that is significantly more, than a population of wild-type or control plants. The population of modified corn plants may share ancestry with a single modified corn plant and/or have a single transgenic GA2 oxidase construct insertion or event in common. Modified corn plants within a population of modified corn plants may generally comprise at least one ear that is substantially free of male reproductive tissues or structures and/or other off-types. A population of modified corn plants may have increased lodging resistance on average or per number of plants or field area than a population of wild-type or control plants. The population of modified corn plants may have a lodging frequency that is at least 5%, at least 10%, at least 20%, at least 30%, at least 40%, at least 50%, at least 60%, at least 70% at least 80%, at least 90%, or 100% less (or lower) than a population of control corn plants. A population of modified corn plants may have a harvest index of at least 0.57 or greater.

[0332] According to embodiments of the present invention, modified corn plants are provided having a reduced gibberellin content (in active form) in at least the stem and internode and possibly other tissue(s), such as the stem, internode, leaf and/or vascular tissue(s), as compared to the same tissue(s) of wild-type or control plants. According to many embodiments, modified corn plants are provided having a significantly reduced plant height and/or a significantly increased stem diameter relative to wild-type or control plants, wherein the modified corn plants further have significantly reduced or decreased level(s) of active gibberellins or active GAs (e.g., one or more of GA1, GA3, GA4, and/or GA7) in one or more stem, internode, leaf and/or vascular tissue(s), relative to the same tissue(s) of the wild-type or control plants. For example, the level of one or more active GAs in the stem, internode, leaf and/or vascular tissue(s) of a modified corn plant may be at least 5%, at least 10%, at least 15%, at least 20%, at least 25%, at least 30%, at least 35%, at least 40%, at least 45%, at least 50%, at least 55%, at least 60%, at least 65%, at least 70%, at least 75%, at least 80%, at least 85%, at least 90%, at least 95%, or at least 100% less or lower than in the same tissue(s) of a wild-type or control corn plant.

[0333] According to some embodiments, a modified corn plant may comprise an active gibberellin (GA) level(s) (e.g., one or more of GA1, GA3, GA4, and/or GA7) in one or more stem, internode, leaf and/or vascular tissue(s) that is between 5% and 50%, between 10% and 100%, between 20% and 100%, between 30% and 100%, between 40% and 100%, between 50% and 100%, between 60% and 100%, between 70% and 100%, between 80% and 100%, between 80% and 90%, between 10% and 90%, between 10% and 80%, between 10% and 70%, between 10% and 60%, between 10% and 50%, between 10% and 40%, between 10% and 30%, between 10% and 20%, between 50% and 100%, between 20% and 90%, between 20% and 80%, between 20% and 70%, between 20% and 60%, between 20% and 50%, between 20% and 40%, between 20% and 40%, between 20% and 30%, between 30% and 90%, between 30% and 80%, between 30% and 70%, between 30% and 60%, between 30% and 50%, between 30% and 40%, between 40% and 90% between 40% and 80%, between 40% and 70%, between 40% and 60%, between 40% and 50%, between 50% and 90%, between 50% and 80%, between 50% and 70%, between 50% and 60%, between 60% and 90%, between 60% and 80%, between 60% and 70%, between 70% and 90%, or between 70% and 80% less or (or lower) than in the same tissue(s) of a wild-type or control corn plant. A modified corn plant having a reduced active gibberellin (GA) level(s) in one or more stem, internode, leaf and/or vascular tissue(s) may further be substantially free of off-types, such as male reproductive tissues or structures and/or other off-types in at least one ear of a modified corn plant.

[0334] According to many embodiments, a modified corn plant is provided comprising a significantly reduced plant height and/or a significantly increased stem diameter relative to wild-type or control plants, wherein the modified corn plant has transgenic or ectopic GA2 oxidase transcript and protein expression in one or more tissues, such as one or more stem, internode, leaf and/or vascular tissue(s), of the modified plant, as compared to the same tissue(s) of a wild-type or control corn plant. For a transgenic or ectopically expressed GA2 oxidase transcript and/or protein that is identical to an endogenous GA2 oxidase transcript and/or protein in corn, the total expression level of endogenous and transgenic GA2 oxidase transcript and/or protein in one or more stem, internode, leaf and/or vascular tissue(s) of a modified corn plant may be at least 5%, at least 10%, at least 15%, at least 20%, at least 25%, at least 30%, at least 35%, at least 40%, at least 45%, at least 50%, at least 55%, at least 60%, at least 65%, at least 70%, at least 75%, at least 80%, at least 85%, at least 90%, at least 95%, or at least 100% greater than the endogenous GA2 oxidase transcript and/or protein levels in the same tissue(s) of a wild-type or control corn plant.

[0335] According to embodiments of the present disclosure, a modified or transgenic corn plant or plant part, one or more modified or transgenic corn plants or plant parts or a plurality modified or transgenic corn plants or plant parts as provided herein, or an agricultural field or soil in which a modified or transgenic corn plant or plant part, one or more modified or transgenic corn plants or plant parts or a plurality modified or transgenic corn plants or plant parts as provided herein are planted or grown, can be treated with an agricultural composition comprising one or more active ingredients or other agents, such as, for example and without limitation, an herbicide or one or more herbicides, a fungicide or one or more fungicides, an insecticide or one or more insecticides, a plant growth regulator or plant stimulant or one or more plant growth regulators and/or plant stimulants, and/or a safener or one or more safeners. Provided below are lists of possible or representative compounds for each of these types of actives or agents, and an agricultural composition may comprise one or any combination or multiplicity of these actives, agents or compounds. Such an agricultural composition may be applied, for example, as a foliar, soil or in-furrow treatment, as a pre-emergent, pre-sowing and/or post-emergent treatment, and/or in some cases, may be applied to modified or transgenic plant part or seed provided herein.

[0336] An agricultural composition may be formulated according to its intended use and application. The appropriate formulation of the agricultural composition may be chosen to have different physicochemical parameters, components and stabilities of the respective compound(s). Possible types of formulations for an agricultural composition can include, for example: wettable powders (WP), water-soluble powders(SP), water-soluble concentrates, emulsifiable concentrates (EC), emulsions (EW), such as oil-in-water and water-in-oil emulsions, sprayable solutions, suspension concentrates (SC), dispersions based on oil or water, oil-miscible solutions, capsule suspensions (CS), dusting products (DP), dressings, granules for scattering and soil application, granules (GR) in the form of microgranules, spray granules, absorption and adsorption granules, water-dispersible granules (WG), water-soluble granules (SG), ULV formulations, microcapsules and waxes. If appropriate, some agricultural compositions of a pesticidal compound or one or more pesticidal compounds might be formulated and used as a seed coating applied to a plant part or seed as provided herein.

### EXAMPLES

### Example 1. Corn Plants with Transgenic Expression of Zm.GA2Ox Genes

[0337] Three different transformation vectors were created each comprising a recombinant DNA construct comprising a transcribable DNA sequence encoding a different GA2 oxidase operably linked to a RTBV vascular promoter. These transformation vectors included a transcribable DNA sequence encoding one of three GA2 oxidase genes from corn: Zm.GA2 oxidase_2 (nucleotide coding and protein sequences being SEQ ID NOs: 3 and 4, respectively), Zm.GA2 oxidase_3 (nucleotide coding and protein sequences being SEQ ID NOs: 5 and 6, respectively), and Zm.GA2 oxidase_9 (nucleotide coding and protein sequences being SEQ ID NOs: 17 and 18, respectively). Each transformation vector having an expression construct comprising the respective GA2 oxidase coding sequence under the control of a rice tungro bacilliform virus (RTBV) promoter (P-RTBV.1, SEQ ID NO: 333) that is known to cause expression in vascular tissues of plants. For each of the three transformation vectors and constructs, an inbred corn plant line was transformed via Agrobacterium mediated transformation according to known techniques. Several transformation events were generated with each of the three constructs, and these transformants were tested in the greenhouse to determine if they had reduced plant height relative to non-transgenic wild type control plants. Ectopic expression of a GA2 oxidase transgene is expected to reduce the level(s) of bioactive GAs and consequently reduce plant height in corn.

### Example 2. Reduced Plant Height in Inbred Corn Plants with Expression of Various GA2 Oxidase Transgenes

[0338] The transformed plants as described in Example 1 were self-crossed to generate inbred plants and tested for zygosity of the transgenic insert. Both homozygous and hemizygous plants were grown in the greenhouse conditions, along with wild type control plants without the transformed event. FIG. 1 shows a representative image of a plant transformed as Event 2 of the GA2ox3 transgene next to a wild type control plant. Plant height (PHT) was measured from soil line to base of highest collared leaf at V5 and V9 vegetative growth stages. A V5 or V9 stage corn plant is defined respectively as a plant with 5 or 9 developed (fully unfolded) leaves of visible leaf collars. Plant height for plants of each of the transformation events was calculated as an average among approximately 10 plants for each event and compared to the average height for control plants. Standard errors were calculated for each event and the control plants, which are represented as error bars in FIG. 2 and FIG. 3. Asterisks (*) indicate a statistical significance between control plants and transgenic plants at p<0.05. As can be seen in Table 18 and FIG. 2, a significant reduction in plant height was observed in two developmental stages in homozygous transgenic plants for one or more events expressing each of three transgenic constructs relative to wild type (WT) control plants. However, for the hemizygous plants in Table 19 and FIG. 3, plants of fewer transformation events had significant plant height reduction, which may be due to reduced expression of the constructs in hemizygous plants.

TABLE 18
Plant Height (in cm) of homozygous inbred corn plants vs. control.

| | | Mean | StdErr | Mean | StdErr |
|---|---|---|---|---|---|
| Gene | Event | (V5) | (V5) | (V9) | (V9) |
| | Control | 21.0 | 0.6 | 53.8 | 1.7 |
| GA2ox3 | Event1 | 12.2 | 0.7 | 25.7 | 1.9 |
| | Event2 | 15.8 | 0.6 | 45.2 | 1.7 |
| | Event3 | 11.5 | 0.6 | 20.8 | 1.8 |
| GA2ox9 | Event4 | 16.2 | 0.8 | 46.4 | 2.2 |
| | Event5 | 10.0 | 0.6 | 19.0 | 1.7 |
| | Event6 | 19.9 | 0.8 | 53.3 | 2.2 |
| GA2ox2 | Event7 | 11.1 | 1.1 | 21.7 | 3.1 |
| | Event8 | 20.0 | 0.7 | 49.4 | 1.9 |
| | Event9 | 20.0 | 0.6 | 51.6 | 1.7 |

TABLE 19
Plant Height (in cm) of hemizygous inbred corn plants vs. control.

| | | Mean | StdErr | Mean | StdErr |
|---|---|---|---|---|---|
| Gene | Event | (V5) | (V5) | (V9) | (V9) |
| | Control | 21.0 | 0.9 | 53.8 | 2.4 |
| GA2ox3 | Event1 | 13.8 | 2.5 | 35.0 | 6.9 |
| GA2ox9 | Event4 | 17.0 | 1.5 | 47.6 | 4.0 |
| | Event6 | 17.8 | 1.5 | 53.3 | 4.0 |
| GA2ox2 | Event7 | 19.9 | 1.1 | 50.3 | 2.9 |
| | Event8 | 20.7 | 2.1 | 46.5 | 5.6 |

[0339] This data indicates that transgenic overexpression of either ZmGA2ox2, ZmGA2ox3 or ZmGA2ox9 using the RTBV vascular promoter is effective at causing reduced plant height phenotypes for at least one or more transgenic events. Thus, overexpression of the GA2 oxidase constructs are effective at reducing plant height.

### Example 3. Reduced Plant Height in Hybrid Corn Plants with Expression of ZmGA2ox2 Transgenes

[0340] Hybrid corn plants hemizygous for the ZmGA2ox2 events described in Example 1 also showed reduced plant height relative to wild type control plants. Transformed inbred plants homozygous for the respective transgenic event from Example 1 were crossed with another elite parental corn line to generate the hybrid corn plants. These hybrid plants were grown under greenhouse conditions along with wild type control plants. Plant height (PHT) was measured from soil line to base of highest collared leaf at V5 and V9 vegetative growth stages. Plant heights for plants having each of the transformation events for ZmGA2ox2 (Events 7, 8, and 9) were calculated as an average among approximately 10 plants for each event and compared to the average height for wild type control plants. Standard errors were calculated for each event and the control plants, which are represented as error bars in FIG. 4. Standard errors were calculated for the transgenic hybrid and control plants, which are represented as error bars in FIG. 4. Asterisks (*) indicate the statistical significance between control plants and transgenic plants at p<0.05.

[0341] As can be seen in Table 20 and FIG. 4, a significant reduction in average plant height was observed in transgenic hybrid plants expressing the GA2ox2 transgene construct, relative to wild type hybrid corn plants, although in this experiment the reduction in plant height was significant for only one event (Event 8) at V9 stage.

TABLE 20
Plant Height (in cm) of hybrid corn plants vs. control.

| | | Mean | StdErr | Mean | StdErr |
|---|---|---|---|---|---|
| Gene | Event | (V5) | (V5) | (V9) | (V9) |
| | Control | 23.3 | 0.2 | 64.3 | 1.2 |
| GA2ox2 | Event7 | 20.5 | 0.3 | 61.1 | 1.5 |
| | Event8 | 18.9 | 0.4 | 54.5 | 1.9 |
| | Event9 | 20.1 | 0.5 | 64.8 | 2.4 |

[0342] This data shows that a reduced plant height phenotype is present in hybrid corn plants in addition to inbred lines for at last one or more events per transgenic construct, suggesting semi-dominant nature of the transgene overexpression.

[0343] Having described the present disclosure in detail, it will be apparent to those skilled in the art that modifications, variations, and equivalent embodiments are possible without departing from the spirit and scope of the present disclosure as described herein and in the appended claims. Furthermore, it should be appreciated that all examples in the present disclosure are provided as non-limiting examples.

The application's sequence listing, which the Patent Office published only in electronic form, follows.

SEQUENCE LISTING (351 sequences)

SEQ ID NO: 1 - DNA, 837 bp, Zea mays
atggtggtgccttccacgacgccggtggtgcgccaagaaacgccaccgccgtcccacgacggcataggcataccgacggtggacctgtcggcgccgggcggccgcggcgcgctgtcgcggcaggtggcgcgcgcgtgcgcgcagcacggcttcttccgggccgtgaaccacggcgtggcgccaggccccgccgcacggctggacgccgccgccaggacgttcttcgcgctggcgccgcacaacaagcagcgcgccggcccgcccagcccactcggatacggctgccgcagcatcggcttcaacggcgacgccggggagctcgagtacctgctgctccacgccaacccggccgccgtcgcgcacagggccagatccatcgacactgatgacccctcgcgcttcagcaatgtggtgaacgagtatgtgggagcgatgaggcagctcgcatgtgagatcctggacctgctcggagaggggctagggctcaaggaccccagatccttcagcaggctcatcgctgacacagacagcgactcactcctgcggataaaccactaccctccaccatgcgccattcacaagcttgaccacgacagtcagtgcaggatgaagaacagtttcaggatcgtggcaggcaatggcgcgaaccagtcggcaggtgcacggatcggattcggggagcactcagacccgcagatccttagcttgctccgatcaaacgatgttgacggccttcaggtgcttctgaacagcgacggcagagaggtgtgggttcaggtgccagccgatccatcagcgttctttgtcaatgttggtgatctcctccaggtaaaataa

SEQ ID NO: 2 - protein, 278 aa, Zea mays
MVVPSTTPVVRQETPPPSHDGIGIPTVDLSAPGGRGALSRQVARACAQHGFFRAVNHGVAPGPAARLDAAARTFFALAPHNKQRAGPPSPLGYGCRSIGFNGDAGELEYLLLHANPAAVAHRARSIDTDDPSRFSNVVNEYVGAMRQLACEILDLLGEGLGLKDPRSFSRLIADTDSDSLLRINHYPPPCAIHKLDHDSQCRMKNSFRIVAGNGANQSAGARIGFGEHSDPQILSLLRSNDVDGLQVLLNSDGREVWVQVPADPSAFFVNVGDLLQVK

SEQ ID NO: 3 - DNA, 1089 bp, Zea mays
atgcgttacgtagctgccactccgaccatgccgtcccttgtcgcggagagcgccgccgaaccgcctctggtggacagctacctggagctgctccggcgcggcggcggcggcggcggcattgcggcggcgaccgagggctgcgtgcaggagcgcgagctgcccttgatcgacctgacgtgcctgcagggcagcgcgggcgaggcggcgaggacgacgtgcgcggacgccatggcgagggcggcctcggagtggggctttttccaggtgaccgggcacggcgtgagccgggcgctgttggagcggctgcgggcggagcaggcgcggctgttccggctgccgttcgaaaccaaggccaaggccgggcttctcaacggctcctaccgctggggcgcccccacggccacgtcgctccgccacctctcgtggtcggaggcgttccacgtcccgctcgccagcatctccggcactgcctgcgacttcggagagctcagctccttgagggacgtggtgcaggaggtggcggacgcgatgtcgcgggtggccaagaccgtggcggtggcgctggcggggagccttctgggccacgacgaggcggcggcgttcccggcggggtgcggcgagaccacctgctacctgcggctcaatcggtacccggcgtgcccgttcgcggcgaacaccttcgggctggtgccccacacggacagcgacttcctgacggtgctgtcccaggaccaggtcgggggcctgcagctcatgacggacgccggctgggtggccgtcaagccccgccccgacgcgctcatcgtcaacatcggcgatctgtttcaggcctggagcaacaacctgtacaagagcgtggagcacaaggtggtggccaacgccgcggcggagcgcttctcggcggcctacttcctgtgcccgtcctacgactcgctcgtcggcacgtgcggcgagccgtcaccgtacagagacttcaccttcggggagtacaggaggaaggtgcaggaggacgtcaagaggaccggaagaaagattgggctccccaactttctcaaacaccggccaccccctcaatcacggcccgcctaa

SEQ ID NO: 4 - protein, 362 aa, Zea mays
MRYVAATPTMPSLVAESAAEPPLVDSYLELLRRGGGGGGIAAATEGCVQERELPLIDLTCLQGSAGEAARTTCADAMARAASEWGFFQVTGHGVSRALLERLRAEQARLFRLPFETKAKAGLLNGSYRWGAPTATSLRHLSWSEAFHVPLASISGTACDFGELSSLRDVVQEVADAMSRVAKTVAVALAGSLLGHDEAAAFPAGCGETTCYLRLNRYPACPFAANTFGLVPHTDSDFLTVLSQDQVGGLQLMTDAGWVAVKPRPDALIVNIGDLFQAWSNNLYKSVEHKVVANAAAERFSAAYFLCPSYDSLVGTCGEPSPYRDFTFGEYRRKVQEDVKRTGRKIGLPNFLKHRPPPQSRPA

SEQ ID NO: 5 - DNA, 996 bp, Zea mays
atggtggtgctcgccaaaccgcctgtcgtcgaccagatcccgctcctgcggtccccgggccccagggacagcttctcgggagtgccggtcgtcgacctgtccagccacggcgcggcgcgggcgatcgtcgacgcctgcgagcgcttcgggttcttcaaggtcgtcaaccacggcgtggccgcggccaccatggacagggccgagtccgaggccgtcaggttcttcgcgcaggcgcaggcggacaaggaccgcgcggggccggcgtacccgttcgggtacggcagcaagcggatcgggctcaatggcgacatggggtggctcgagtacctcctcctcgccgtcgacgccgcgtcgctctccgacgcctgccccgtgccctccagcgccgcgttccggagcgcgctgaacgagtacgtcgcggccgtgcggaaggtggcggcgcgtgtgctggaggcgatggcggagggcctgggcattgcggacgcggacgcgctgagctccatggtgagcggcgccgggagcgaccaggtgttccgcgtgaaccactacccgccctgccccgcgctgcagggcctgggctgcagcaccacgggcttcggcgagcacaccgacccgcagatcatctccgtgctccgctccaacggcacctccggcctgcagatcgcgctccgcgacggcgcgcagtgggtctccgtgccctccgaccgcgacgccttcttcgttaacgtcggcgactcgttgcaggtgctgaccaacgggaggttcaggagcgtgaagcaccgggtggtgaccaacagcctcaagtccagagtttccttcatctacttcgcggggccgccgctggggcagcggatcgcgccgctgccgcaggtgctggcggagggagaggagagcctgtacaaggagttcacgtggggcgagtacaagaaggccgcgtacaagacgaggctcggcgacaacaggctggcccagtttgagaagcgtagcaacatctag

SEQ ID NO: 6 - protein, 331 aa, Zea mays
MVVLAKPPVVDQIPLLRSPGPRDSFSGVPVVDLSSHGAARAIVDACERFGFFKVVNHGVAAATMDRAESEAVRFFAQAQADKDRAGPAYPFGYGSKRIGLNGDMGWLEYLLLAVDAASLSDACPVPSSAAFRSALNEYVAAVRKVAARVLEAMAEGLGIADADALSSMVSGAGSDQVFRVNHYPPCPALQGLGCSTTGFGEHTDPQIISVLRSNGTSGLQIALRDGAQWVSVPSDRDAFFVNVGDSLQVLTNGRFRSVKHRVVTNSLKSRVSFIYFAGPPLGQRIAPLPQVLAEGEESLYKEFTWGEYKKAAYKTRLGDNRLAQFEKRSNI

SEQ ID NO: 7 - DNA, 1086 bp, Zea mays
atgccggccttcgcggggggcgcagcggagccgccgctggcagacagctactacgcgctcctccgccgcggcaatgacgatgaaggcgcctacacgacgtcgacagcgccatgggacgacgtctcactgcccgtggcggagtgcgagctcccgatgatcgacgtcgggtgcctgacgaccgccgacgacggcagctccccggaggcggaggcggagcgggcggcgtgcgcggccgccatcgcgcgcgccgccgaggagtggggcttcttccaggtgcgcaaccacggcgtgccgcaggagctcctggaggagatgcgccgggagcaggcgcgcctgttccgcctgccgttcgagaccaaggccacggccggcctgctcaacgactcctaccgctggggcaccccgaccgcgacgtctccgcgccagctgtcctggtccgaggccttccacgtcccgctcgccggcgtctccggctccggcaccacctgcgacttcggcgacctcaccaccctcagggatgtgactcgggaggtggcgggcgcgatgtcaaagctggccggcacgctggcgcgcgtcctggcggaggccctcctgggtcggcggcccgccggcgagcgcttcccggaggggtgcgacgagacgacgtgcttcctgcggctgaaccggtacccggcgtgccccatctccccaggcgccttgggcctggtcccgcacacggacagcgacttcctcaccgtgctctgccaggaccagcaggtcggcggcctgcagctcatgaagggggacagttgggtggccgtcaagccaatccccggcaccctcgtcgtcaacatcggggacctcttccaggcgtggagcaacaacagatacaagagcgtggagcacaaggtgatgacgaacgccaggacggagcgctactccgtcgcctactttctctgcccgtcctacgactcgccgatcggcacgtgcgaggagccttctctctacaggacgttcaccttcggggagtacaggagaaaggtgcaggaagacgtcaagaggaccgggaagaaggtcggcctccctaattttctcgcgcaaacataa

SEQ ID NO: 8 - protein, 361 aa, Zea mays
MPAFAGGAAEPPLADSYYALLRRGNDDEGAYTTSTAPWDDVSLPVAECELPMIDVGCLTTADDGSSPEAEAERAACAAAIARAAEEWGFFQVRNHGVPQELLEEMRREQARLFRLPFETKATAGLLNDSYRWGTPTATSPRQLSWSEAFHVPLAGVSGSGTTCDFGDLTTLRDVTREVAGAMSKLAGTLARVLAEALLGRRPAGERFPEGCDETTCFLRLNRYPACPISPGALGLVPHTDSDFLTVLCQDQQVGGLQLMKGDSWVAVKPIPGTLVVNIGDLFQAWSNNRYKSVEHKVMTNARTERYSVAYFLCPSYDSPIGTCEEPSLYRTFTFGEYRRKVQEDVKRTGKKVGLPNFLAQT

SEQ ID NO: 9 - DNA, 1017 bp, Zea mays
atggcgccggagtctctcccgctcggcattatcccgacggtggacatgtcggcgccgtcggggcgcggcgagctggcgcgccggctggtgcgcgcctgcgcggagcgcggcttcttcaaggccgtcaaccacggcgtgccgccgcgggtgtccgcccggctggacgccgccacgtcggcgttcttcgcgcgccccgctccggtgaagcaggcggccgggccgccggacccgctggggtatggcagccggaacattggtgccaacggcgacgtcggcgagctggagtacctcatcctgcacgcccaacccgcagcagtggcgcgcaaggccatggtcatcgacgcggaggacccttcgcggttcagtgtagcagtgaacgagtacgtggacgcagtgcggcgtctcgcgtgccgggtcctggacctcctcggcgagggcctcggcctcggggacccgacgtccttgagccgcttcgtctcggccgtcgtcgacagcgactccgtcctcaggatcaaccactaccccacgtccagcgcggcggcggatgtgtctgccaagggcatcgggttcggcgagcacaccgacccgcagatcctcagcctgctccgcgccaacgacgtggacggcctgcaggtgctgctgcccgacgcccgcggcggcagcggcggcgaccagtgggtccaggtgccggctgacccgtccgccttcttcatcaacgtcggtgacgcccttcaggccctgacaaacgggcggttggtgagcatccggcacagggtgatggccagcaccacccggccgcggctgtccaccatctacttcgccgcgccgccgctcgacgcccgcatcgcagcgctcccggagacggtggttgccggcgcggcgcggcggtacaggaccttcacatgggcggagtacaagaaggccatgtacgcgctccgcctcagccacaaccgtcttgatctcttccacgcagacgcatcctccggcggcagcggcgataaaaagcatgatatatag

SEQ ID NO: 10 - protein, 338 aa, Zea mays
MAPESLPLGIIPTVDMSAPSGRGELARRLVRACAERGFFKAVNHGVPPRVSARLDAATSAFFARPAPVKQAAGPPDPLGYGSRNIGANGDVGELEYLILHAQPAAVARKAMVIDAEDPSRFSVAVNEYVDAVRRLACRVLDLLGEGLGLGDPTSLSRFVSAVVDSDSVLRINHYPTSSAAADVSAKGIGFGEHTDPQILSLLRANDVDGLQVLLPDARGGSGGDQWVQVPADPSAFFINVGDALQALTNGRLVSIRHRVMASTTRPRLSTIYFAAPPLDARIAALPETVVAGAARRYRTFTWAEYKKAMYALRLSHNRLDLFHADASSGGSGDKKHDI

SEQ ID NO: 11 - DNA, 1002 bp, Zea mays
atggtggtcctcaccaagggcgagctggagcagatcgcgctgccggccgtgcagcgcgcatcgccgccgccgccggccgccgtgccggaggtcgacctggcagccggggacgccgccgccgccgcgcgcgcggtggccaaggcgtgcgaggaccacggcttcttcaaggtgacgggccacggcgtgccgccgcacctcctggcgcgcctcgaggccgccgcggccgcgttcttcgcgctcccgcagcgggagaaggacagggccgccggctgcccgttcggatacgccagcaagcggattggcgccaacggcgatctcggctgggtcgagtacctcctgcttgccgtcaccgccgccggcgcagcggccgcgccggggtctgcgtgcgagggcgcggagccgtcctgtttccgtgctgtgctggacgagtacgtggcggcggtgaggcgcatgacctgcacggtgctgcagctgatggcgcaggggctgggcctcgacgacagggacgtgttcagccggctggtgctggaccgggacagcgactccatgctgagggtgaaccactacccgccagcggcggagacgaggcggctgacggggttcggcgagcacaccgacccgcagatcatctccgtcctccgctccaacgacgcgtccggcctcgagatcacgctgcgggacggcacctgggtgtccgtgccctccgacacggaatccttcttcgtcaatgtcggcgacgcgttgcaggtgctgaccaacgggcggttccggagcgtgcggcaccgggtgatggtgagcagcgcgcggccgcgggtgtcggtgatcttcttcggcggcccgccgccgcgggagcgcctggcgccgctgccgggtctggtggaccgggagggcggccgacgccgctacagggagttcacgtggagggagtacaagaactcggcgtaccggaccaagctggcagacaacaggctctgctccttcgagaccatggcgacgagctag

SEQ ID NO: 12 - protein, 333 aa, Zea mays
MVVLTKGELEQIALPAVQRASPPPPAAVPEVDLAAGDAAAAARAVAKACEDHGFFKVTGHGVPPHLLARLEAAAAAFFALPQREKDRAAGCPFGYASKRIGANGDLGWVEYLLLAVTAAGAAAAPGSACEGAEPSCFRAVLDEYVAAVRRMTCTVLQLMAQGLGLDDRDVFSRLVLDRDSDSMLRVNHYPPAAETRRLTGFGEHTDPQIISVLRSNDASGLEITLRDGTWVSVPSDTESFFVNVGDALQVLTNGRFRSVRHRVMVSSARPRVSVIFFGGPPPRERLAPLPGLVDREGGRRRYREFTWREYKNSAYRTKLADNRLCSFETMATS

SEQ ID NO: 13 - DNA, 1005 bp, Zea mays
atggtcgtcctcgcgaagccgccggctctcgaccaaatctccctgctccgatccccgcagcccggggacgcctcctccttccccggcgtgccggccgtcgacctctccagccccggcgccgccctggccgtggtggacgcgtgcgagcgcttcggcttcttcaaggtcgtcaaccacggcgtgccagcgggcgtcgtggaccggctggaggccgaggccgtcaggttcttcgcgtcgccgcaggcggccaaggacgcgtgcgggtgcggccccgccagcccgctcgggtacgggaacaggcgcatcgggcgcaatggcgacatggggtggctcgagtacctcctcctcgccctcgacggcaacgcctcggtgtccaaggcctcccctgtcccgtcatcctcgctgcgggacgcggtgaaccagtacgtggcctccgtgaggggcctggcgacgtcggtgctggaggcggtggcggaggggctcggcgtggcgccgagggacgcgctgagcggcatggtggcggacgcggcgagcgaccaggtgttccggatcaaccactaccctgcgtgcccgctgctgcagcgcctgccggactcgtgcggcgtcaccggcttcggcgagcacacggacccgcagctggtgtccgtgctgcgctccaacggcacgcccggcctgcagctggcgctccacggcgacgacgggcgctgggtgcccgtgcctcccgaccgcgacgccttcttcgtcatcgtcggcgactcgctgcaggtcctgacgaatgggaggctgaaaagtgtgcggcaccgggtggtggccaacagcctgaagccgcgggtgtccatgatctacttcgcgggaccggcgccggcgcagcggatcgcgccattgccgcagctgctggggcacggcaagcagagcctgtacagggacttcacatggggcgactacaagaaggctgcctaccgctcgcggctcggagacaaccgcctggaccccttccgcatctag

SEQ ID NO: 14 - protein, 334 aa, Zea mays
MVVLAKPPALDQISLLRSPQPGDASSFPGVPAVDLSSPGAALAVVDACERFGFFKVVNHGVPAGVVDRLEAEAVRFFASPQAAKDACGCGPASPLGYGNRRIGRNGDMGWLEYLLLALDGNASVSKASPVPSSSLRDAVNQYVASVRGLATSVLEAVAEGLGVAPRDALSGMVADAASDQVFRINHYPACPLLQRLPDSCGVTGFGEHTDPQLVSVLRSNGTPGLQLALHGDDGRWVPVPPDRDAFFVIVGDSLQVLTNGRLKSVRHRVVANSLKPRVSMIYFAGPAPAQRIAPLPQLLGHGKQSLYRDFTWGDYKKAAYRSRLGDNRLDPFRI

SEQ ID NO: 15 - DNA, 1122 bp, Zea mays
atggtggcgatcacggcgccgagctcgatcgagcagatcccgctgatgcggtgccccagggccaatgcggtgcagcaggcgggcgcggccgtcccgtgcgtggacctgtcggcgccgggcgcgggcgcggcggtggccgacgcgtgccgcagcgtgggcttcttcagggcgacgaaccacggcgtgccggcgcgcgtggccgacgcgctggaggcccgcgcgatggccttcttcgcgctgcccgcgcaggagaagctggacatgtccggcgccgcccggcccctggggtacggcagcaagagcatcggcgccaacggcgacgtcgggtggctggagtacctcctcctgtccgtcagcgccaacaccgtgaagatctcgtcgctgccgccctcgctccgggcggcattggaggagtacacggcggcgttgagggaggtgtgcgggcgggtgctggagctgatagcggaggggctgggcgtggagcggtccctgctgcgcgcgatggtggtggggcgggaaggcagcgacgaggtggtgcgggtgaaccactacccgccctgcccgctgctgccgccggtggactgcggcgtgacggggttcggggagcacacggacccgcagatcatctccgtgctctggtccaaccgcactgcgggcctgcagatcaagctccgggacggcaggtgggtccccgtgccccccacaccggaatccctcttcgtcaacgtcggagactcgctgcaggttctgacgaacgggcggttaaggagcgtgaagcaccgggtggtggcgccggcgccggcgccggatggcgcgcggtcccggctgtccgtgatctacttcggcgggccggcgccgtcgcagcggatcgcgccgctgccgcaggtgatgcgggacggggagcagagcctgtaccgggagttcacgtgggccgagtacaagcgcgccatgtacaagacccgcctcgccgaccaccgcctcgggcccttcgagctgcgcgccagcaccaacggcggcaacaggcccggcgagcccgcggcgggcagcgcggacccggcgcactgcagcggcggcagcgcctgcggcatgccgcagccgcagcaggtggcgcgggtgcactag

SEQ ID NO: 16 - protein, 373 aa, Zea mays
MVAITAPSSIEQIPLMRCPRANAVQQAGAAVPCVDLSAPGAGAAVADACRSVGFFRATNHGVPARVADALEARAMAFFALPAQEKLDMSGAARPLGYGSKSIGANGDVGWLEYLLLSVSANTVKISSLPPSLRAALEEYTAALREVCGRVLELIAEGLGVERSLLRAMVVGREGSDEVVRVNHYPPCPLLPPVDCGVTGFGEHTDPQIISVLWSNRTAGLQIKLRDGRWVPVPPTPESLFVNVGDSLQVLTNGRLRSVKHRVVAPAPAPDGARSRLSVIYFGGPAPSQRIAPLPQVMRDGEQSLYREFTWAEYKRAMYKTRLADHRLGPFELRASTNGGNRPGEPAAGSADPAHCSGGSACGMPQPQQVARVH

SEQ ID NO: 17 - DNA, 1011 bp, Zea mays
atggtggtcctcgccaagggtgagctcgagcagatcgccctcccggctgcagagccgcccccggccgacgtgcggtcggtggacctgtccgccccggcgggccccgcgcgcgaggccgcggcgcgcgcgctggtggcggcgtgcgaggagcacgggttcttccgggtgacgggccacggcgtgccggccagactcgtgcgcgccgcggaggccgcggcggccgggttcttcgcgcggccgcagggcgagaaggaggaggagggccccacgctcgggtacggaagcaagcgcatcggcggcaacggcgacctcggctgggtcgagtacctcctgctcggtggcacacccgccgccgcgccttcctcggcattattgccctgcgccgccgccccgtcgccgtccgcgccggccgggccgttacgggaccttctggacgagtacacggtggcggtgcggcggatggcgtgcgcggtgctggagctgatggcggaggggctgggcatcgccggcggcgccggggacgcggtgctggcgcggctggtggcgcgcgcggacagcgactgcatgctgcgggtgaaccactacccgccgcggccggcgctcaaccccagcctcacggggttcggcgagcacaccgacccgcagatcatctcggtgctccgcgccaacggcacctccggcctggagatcgcgctgcgggacggcgcctgggcctccgtcccgcccgacggggacgccttcttcgtcaacgtcggcgacaccctgcaggtgttgacgaacgggaggttcaggagcgtgaggcacagggtggtggtgaacagcgagaagtcccgggtgtccatggtcttcttcgcggccccgccgcccggcgagaggctgggcccgctgccgcagctcctgggcgacggcggccggagccggtaccgggacttcacctggagcgagttcaagaccagcgggtgcaggaccaggctcgcggaagaccgcctgtcccgcttcgagaagaagtag

SEQ ID NO: 18 - protein, 336 aa, Zea mays
MVVLAKGELEQIALPAAEPPPADVRSVDLSAPAGPAREAAARALVAACEEHGFFRVTGHGVPARLVRAAEAAAAGFFARPQGEKEEEGPTLGYGSKRIGGNGDLGWVEYLLLGGTPAAAPSSALLPCAAAPSPSAPAGPLRDLLDEYTVAVRRMACAVLELMAEGLGIAGGAGDAVLARLVARADSDCMLRVNHYPPRPALNPSLTGFGEHTDPQIISVLRANGTSGLEIALRDGAWASVPPDGDAFFVNVGDTLQVLTNGRFRSVRHRVVVNSEKSRVSMVFFAAPPPGERLGPLPQLLGDGGRSRYRDFTWSEFKTSGCRTRLAEDRLSRFEKK

SEQ ID NO: 19 - DNA, 1017 bp, Zea mays
atggtggtggtgctcgccaacccgcctgtcgtggaccagatcccgctcctgcggtccccgggccccagggacagcttctcgtgcgtgccggtcgtcgacctgtccggccccggcgcggcgcgcgcgatcgtcgacgcctgcgagcgcttcggcttcttcaaggtcgtcaaccacggcgtgcccgcggccaccatggacgtggccgagtccgaggccgtcggcttcttcgcgcaggcgcaggccgacaaggaccgcgcgggcccccgcgcgtcgtacccgttcggctacggcagcaagcggatcggcctcaatggcgacatggggtggctcgagtacctcctcctcgccgtcgactccgcgtcgctctccgacgcctgccccgtcccatccggcgccgcgttccggagcgcgctgaacgagtacgtcgcggccgtgcgggacgtcgcggcgcgcgtgctggaggcgatggcggagggcctgggcatcgcggacgcggccgcgctcagctcgatggtgaccggcgccggcagcgaccaggtgttccgcgtcaaccactacccgccctgccccgcgctgcagggcctgggctgcaccgccaccgccacgggcttcggcgagcacaccgacccgcagatcatctccgtgctccgctccaacggcacgtccggcctgcaggtcgcgctccgcgacgccgcgcaggcgcagcagtgggtgtccgtgccctccgaccgcgacgccttcttcgttaacgtcggcgactcgttgcaggtgctgaccaacgggaggttcgagagcgtgaagcaccgggtggtgaccaacagcctcaagtccagggtttccttcatctacttcgcgggaccggcgctggagcagcggatcgcgccgctggcgcagctgctggcggagggcgaggagagcctgtacagggagttcacgtggggcgagtacaagacggccgcgtacaagacgaggctcggcgacaacaggctggcccagtttcagaggtgtagcatctaa

SEQ ID NO: 20 - protein, 338 aa, Zea mays
MVVVLANPPVVDQIPLLRSPGPRDSFSCVPVVDLSGPGAARAIVDACERFGFFKVVNHGVPAATMDVAESEAVGFFAQAQADKDRAGPRASYPFGYGSKRIGLNGDMGWLEYLLLAVDSASLSDACPVPSGAAFRSALNEYVAAVRDVAARVLEAMAEGLGIADAAALSSMVTGAGSDQVFRVNHYPPCPALQGLGCTATATGFGEHTDPQIISVLRSNGTSGLQVALRDAAQAQQWVSVPSDRDAFFVNVGDSLQVLTNGRFESVKHRVVTNSLKSRVSFIYFAGPALEQRIAPLAQLLAEGEESLYREFTWGEYKTAAYKTRLGDNRLAQFQRCSI

SEQ ID NO: 21 - DNA, 1116 bp, Zea mays
atggtggtgccttccacgacgccggtggtgcgccagcaaacgacgccgccgcagtcatcccacgccggcggcataccgacggtggacctatcggcgcacggcggccgcggcgctctgtcgcggcaggtggtgcgcgcgtgcgcggagcacggcttcttccgggccgtgaaccacggcgtgccgccgggccccgccgcgcggctggacgccgccgccaggacgttcttcgcgctggcgccgcgcgacaagcagcgcgccggcccgcctagcccgctcggctacggctgccgtagcatcggcttcaacggcgacgccggggagctcgagtacctgctgctccacgccaacaacccggccgccgtcgcgcacagggccagggccatcgacgcggaggagccctcgcgattcagtaatgtggtgaacgagtacgtgggagcaatgaggcagcttgcatgtgagatcctggacctgttaggagaggggctagggctcgaggaccccaggtccttcagcaagctcatcaccgacacagacagcgactcactcctgaggatcaaccactaccctacagcatgcaacgctcacaaccttgaccatgacagccagtgcaagatgaagagcagcgtcagaaccaagactactagcaatggcgtgaagccgtcggcaggtggacgggtcggattcggggagcattcagacccgcagattcttagcttgcttcgagcaaatgacgtcgacggccttcaggtgcttctgaacgccgacggcaaggaggtgtgggttcaggtgccggccgatcagtcagcgttctttgtcaatgttggtgacctcctccaggctttaacaaatgggaagctggtaagtgtccggcacagggtaattgcaagctccagcagggcaaggctgtcgacaatctacttcgcagcgccgccactgcatgcgcgaattttggccctcgcagagacgatcacagccaacgcacccagccagtaccggcccttcacctgggccgagtacaagaagacaatgtactcgctccgcctgagccacagccgcctcaacctcttccacatcgaccatgatggccacagcaatgtcggtgaaggagaagaatag

SEQ ID NO: 22 - protein, 371 aa, Zea mays
MVVPSTTPVVRQQTTPPQSSHAGGIPTVDLSAHGGRGALSRQVVRACAEHGFFRAVNHGVPPGPAARLDAAARTFFALAPRDKQRAGPPSPLGYGCRSIGFNGDAGELEYLLLHANNPAAVAHRARAIDAEEPSRFSNVVNEYVGAMRQLACEILDLLGEGLGLEDPRSFSKLITDTDSDSLLRINHYPTACNAHNLDHDSQCKMKSSVRTKTTSNGVKPSAGGRVGFGEHSDPQILSLLRANDVDGLQVLLNADGKEVWVQVPADQSAFFVNVGDLLQALTNGKLVSVRHRVIASSSRARLSTIYFAAPPLHARILALAETITANAPSQYRPFTWAEYKKTMYSLRLSHSRLNLFHIDHDGHSNVGEGEE

SEQ ID NO: 23 - DNA, 1065 bp, Zea mays
atggcaatggaggaagacgacgactacgagccgccgttgatggccacgtacaagcatctgttggacagtcacccgcaccgacaactgggcgccggcgccgcgcaagacgacgaggattgcttcctcctcccggtgatcgacctttccagcctcctgccgccggtgcatcatcgcaagcagtcatcatcagcagcagctgcagagcagtgccgggcgtccatcgtgcgcgccgcctccgagtggggcttcttccaggtgaccaaccacggcgtgccgcaggttctgctggacgagctgcaccaggcgcaggccggcgtcttccgccggcccttccaactcaaggcgcaccagccgctgctggacttctcgccggagagctaccgctggggcacgcccaccgccacgtgcctggagcagctctcgtggtccgaggcctaccacatccccacaacgacgaccacgaccggtaacgacgacaagacccggctagtggtcgaggaggtgtcgacggcgatgtcgaagctggcgcagcggctggcggggatcctcgtcgcggagctgggcgaagacagcgcggcggcggtggtgtcgcggtgcacgcggagcacctgcttcctgcggctgaaccggtacccgccgtgcgcggcggcggccagcggcgtcgtctacgggctgtgcccacactcggacagcgacttcctgaccatactccaccaggacggcgtcggcggcctccagctcgtcaaggacgggcagtgggtagccgtgaagcccagccccggcgcgctcatcgtcaatgtgggcgacctcctgcaggcgtggagcaacgaccggtaccggagcgtcgagcaccgggtgatggccagcgccacgagggagcggttctccgccgccttcttcctgtgccccagctacgacacgctcatccggccgcgctgcggcgccggcggacctcctcctcgctatgagagcttcaccttcggggagtaccggaaccagatcagggaggacgtcaggctcacgggccgaaagctcggcctgcaacgcttccgcaaagcagagtag

SEQ ID NO: 24 - protein, 354 aa, Zea mays
MAMEEDDDYEPPLMATYKHLLDSHPHRQLGAGAAQDDEDCFLLPVIDLSSLLPPVHHRKQSSSAAAAEQCRASIVRAASEWGFFQVTNHGVPQVLLDELHQAQAGVFRRPFQLKAHQPLLDFSPESYRWGTPTATCLEQLSWSEAYHIPTTTTTTGNDDKTRLVVEEVSTAMSKLAQRLAGILVAELGEDSAAAVVSRCTRSTCFLRLNRYPPCAAAASGVVYGLCPHSDSDFLTILHQDGVGGLQLVKDGQWVAVKPSPGALIVNVGDLLQAWSNDRYRSVEHRVMASATRERFSAAFFLCPSYDTLIRPRCGAGGPPPRYESFTFGEYRNQIREDVRLTGRKLGLQRFRKAE

SEQ ID NO: 25 - DNA, 996 bp, Zea mays
atggtggtcctcgccaagggtgagctcgagcagatcgcgctgcctgcggcggcgccgccacgggccgacgtgcggtcggtggacctgtcggccccggcgggcccggcgcgcgaggccgcggcgcgcgcgctggtggcggcgtgcgaggagcacgggttcttccgggtgacgggccacggcgtgccggccgagctcgtgcgcgccgcggaggccgcggcggccgggttcttcgcgcggccgcagggcgagaaggacggggaggcccccacgctcgggtacggcagcaagcgcatcggcggcaacggcgacctcggctgggtcgagtacctcctgctcggcgtcaaccccgccgtgcccgccgcctccgcgtcctcctcgacattgccgttgcggggccttctggacgagtacacggtggcggtgcggcggatggcgtgcgcggtgctggagctgatggcggaggggctgggcatcgccggcgccggggacggggacggggacacggtgctggcgaggctggtggcgcgcgcggacagcgactgcatgctgcgggtgaaccactacccgccgcggccggcgctgaactacccctgcctcacggggttcggcgagcacaccgacccgcagatcatctcggtgctccgcgccaacggcacgtccggcctggaggtcgcgctgcgggacggcgcctgggcctccgtcccgcccgacggggacgccttcttcgtcaacgtcggcgacaccctgcaggtgttgacgaacgggaggttcaggagcgtgaggcacagggtggtggtgaacagcgagaagtcccgggtgtccatgatcttcttcggcgggccgccgcccgacgagaggctggcgccgctgccgcagcttctgggagacgacggcggccggagccggtaccgggacttcacctggagcgagttcaagaccagcgggtgcaggaccaggctcgcggaagaccgcctgtcccgcttcgagaagcagtag

SEQ ID NO: 26 - protein, 331 aa, Zea mays
MVVLAKGELEQIALPAAAPPRADVRSVDLSAPAGPAREAAARALVAACEEHGFFRVTGHGVPAELVRAAEAAAAGFFARPQGEKDGEAPTLGYGSKRIGGNGDLGWVEYLLLGVNPAVPAASASSSTLPLRGLLDEYTVAVRRMACAVLELMAEGLGIAGAGDGDGDTVLARLVARADSDCMLRVNHYPPRPALNYPCLTGFGEHTDPQIISVLRANGTSGLEVALRDGAWASVPPDGDAFFVNVGDTLQVLTNGRFRSVRHRVVVNSEKSRVSMIFFGGPPPDERLAPLPQLLGDDGGRSRYRDFTWSEFKTSGCRTRLAEDRLSRFEKQ

SEQ ID NO: 27 - DNA, 1149 bp, Oryza sativa
atggtggtgccttccgcgacgacgccagcgaggcaggagacggtggtggcggcggcgccgccagctgcggcggcgtccggtgtcgtcggcggcggcggcggcgtgacgatagcgacggtggacatgtcggcggagcgcggcgcggtggcgaggcaggtggcgacggcgtgcgcggcgcacgggttcttccggtgcgtcgggcacggcgtgccggcggcggcgcccgtcgcggcgaggctggacgccgcgacggcggcgttcttcgcgatggcgccggcggagaagcagcgcgccgggccggcgagcccgctcgggtacggctgccggagcatcgggttcaacggcgacgtcggcgagctggagtacctgctcctccacgccaaccccgccgccgtcgcgcaccgggccaggaccatcgacgccatggacccctctcgcttcagtgctattgtgaatgagtacattgaagccatgaagaagctcgcatgtgagatcctggacctgttaggagaggggctaggtctcaaggaccccagatacttcagcaagcttaccacaaacgctgacagtgactgcctcctgaggatcaaccactaccctccatcatgcaacattcacaaacttgaccatgatgaccaatgcaatatcaagagccttgttagcaccaaggctagcaatggtgggaatctgatggcaggtgggcgcattgggttcggcgagcactctgacccgcagatccttagcttgctccgagcaaacgatgtggaagggctacaggtgtttgtgccggaccacgagggcaaggagatgtgggttcaggtgccatcggacccatcggccattttcgtcaatgttggtgatgtcctccaggctctgacaaatgggaggctgataagtatccggcacagggtaattgcaaccgcctgcaggccaaggctgtccacaatatacttcgcatcaccacccctgcatgcacgaatctcggcactcccagagacaatcacagccagcagcccacgccgataccgatcattcacctgggctgagtacaagacgacaatgtactcactccgcctgagccacagccgcctagaactcttcaaaattgacgatgatgacagcgacaatgccagtgagggaaaagcatag

SEQ ID NO: 28 - protein, 382 aa, Oryza sativa
MVVPSATTPARQETVVAAAPPAAAASGVVGGGGGVTIATVDMSAERGAVARQVATACAAHGFFRCVGHGVPAAAPVAARLDAATAAFFAMAPAEKQRAGPASPLGYGCRSIGFNGDVGELEYLLLHANPAAVAHRARTIDAMDPSRFSAIVNEYIEAMKKLACEILDLLGEGLGLKDPRYFSKLTTNADSDCLLRINHYPPSCNIHKLDHDDQCNIKSLVSTKASNGGNLMAGGRIGFGEHSDPQILSLLRANDVEGLQVFVPDHEGKEMWVQVPSDPSAIFVNVGDVLQALTNGRLISIRHRVIATACRPRLSTIYFASPPLHARISALPETITASSPRRYRSFTWAEYKTTMYSLRLSHSRLELFKIDDDDSDNASEGKA

SEQ ID NO: 29 - DNA, 1113 bp, Oryza sativa
atggtggtgccggctgctgctgcgccggaatgcggccgccgggaggcggcggcggcagctgcggccgccgtgttctgtcggcgcggccggggcgtcgtcgtcccgacggtcgacatgtcggcgccggcggggcgcggcgagctgtcgcggcaggtggcgcgggcgtgcgccgggagcggcttcttcagggccgtcaaccacggcgtgccgccgcgggtgtccgcggcgatggacgccgccgcggcggcgttcttcgtgcgggcgggggccgagaagcagctcgccgggccgcccgacccgctgggctacggcagccggagcatcggggcgaacggcgacgtcggcgagctggagtacctgatcctgcacgcgagccccgacgcggtggcgcgcaaggccagcgccatcgacagggaagaccctcgacggttcagccaggtggtaaatgattatgtggaggcagtgaggcagcttgcttgccatgtccttgacctgctaggagagggcctaggcctcagggaccccacatccctgacaaggctcatcacagccactgacaacgactccctcatcaggatcaatcactaccctccatcctgcgccgccgccgccggcgaccacaagtccggcggcggcccggcgccgacggcggccatcgggttcggcgagcacaccgaccctcagatcctcagcgtcctgcgtgccaacgacgccgacggcctgcagctgcttctgccggacgccgccgccgccggcgacagcgtctgggtccccgtgccgcccgacccgtccgcgttcttcgtcaacgtcggtgatctccttcaggctttgacaaacgggaggctggtgagtatccggcacagggtggtggtcggcaccggcaagccgaggctgtcgaccatctacttcgcggcgccgccgctgcacgccaggatctcggctctcccggagacggtggccgccggcgcgccgcgccggtacagggccttcacctgggcggagtacaagaggaccatgtacacgctccgcctcagccacaaccgcctcgacctcttccacgccggcgacggcgacggcgatgccggcgttggggacgatgacgaccatgaatag

SEQ ID NO: 30 - protein, 370 aa, Oryza sativa
MVVPAAAAPECGRREAAAAAAAAVFCRRGRGVVVPTVDMSAPAGRGELSRQVARACAGSGFFRAVNHGVPPRVSAAMDAAAAAFFVRAGAEKQLAGPPDPLGYGSRSIGANGDVGELEYLILHASPDAVARKASAIDREDPRRFSQVVNDYVEAVRQLACHVLDLLGEGLGLRDPTSLTRLITATDNDSLIRINHYPPSCAAAAGDHKSGGGPAPTAAIGFGEHTDPQILSVLRANDADGLQLLLPDAAAAGDSVWVPVPPDPSAFFVNVGDLLQALTNGRLVSIRHRVVVGTGKPRLSTIYFAAPPLHARISALPETVAAGAPRRYRAFTWAEYKRTMYTLRLSHNRLDLFHAGDGDGDAGVGDDDDHE

SEQ ID NO: 31 - DNA, 984 bp, Oryza sativa
atggtggttctcgctggcccgcccgccgtcgatcacatcccgctgctgaggtcgccggaccccggcgacgtcttctccggcgtgccggtcgtcgacctcggcagccccggcgcggcgagggccgtggtggacgcctgcgagcggtacgggttcttcaaggtcgtcaaccacggcgtggccacggacacgatggacaaggccgagtcggaggccgtcaggttcttctcccagacgcagcccgacaaggaccgctccggcccggcctacccgttcgggtacggcagcaagcggatcgggttcaatggcgacatggggtggctcgagtacctcctcctcgccctcgacgacgcgtcgctcgccgacgcctgcaccgtcccgtcctgcgcggtcttccgggccgctctgaacgagtacatctcgggggtgcggaaggtggcggtgcgggtgatggaggcgatgtcggaggggctgggcattgcgcaggcggacgcgctgagcgcgctggtgacggcggaagggagcgaccaggtgttccgcgtgaaccactacccgccgtgccgcgcgctgcaggggctcggctgcagcgtcaccggcttcggcgagcacaccgacccgcagctcgtctccgtgctccgctcaaacggcacgtccggcctgcagatcgcgctccgcgacggccagtgggtgtccgtgccctccgaccgcgactccttcttcgtcaacgtcggcgactcgttgcaggttctgaccaatgggaggttcaagagcgtgaagcacagggtggtggccaacagcctaaagtctagggtttccttcatctactttggagggccaccgttagcacagaggattgcaccattgccacagctgctgggggagggagagcagagcctgtacaaggagttcacatgggatgagtacaagaaggctgcctacaaatcaaggcttggagacaacaggctggcccagtttgagaagaagtag

SEQ ID NO: 32 - protein, 327 aa, Oryza sativa
MVVLAGPPAVDHIPLLRSPDPGDVFSGVPVVDLGSPGAARAVVDACERYGFFKVVNHGVATDTMDKAESEAVRFFSQTQPDKDRSGPAYPFGYGSKRIGFNGDMGWLEYLLLALDDASLADACTVPSCAVFRAALNEYISGVRKVAVRVMEAMSEGLGIAQADALSALVTAEGSDQVFRVNHYPPCRALQGLGCSVTGFGEHTDPQLVSVLRSNGTSGLQIALRDGQWVSVPSDRDSFFVNVGDSLQVLTNGRFKSVKHRVVANSLKSRVSFIYFGGPPLAQRIAPLPQLLGEGEQSLYKEFTWDEYKKAAYKSRLGDNRLAQFEKK

SEQ ID NO: 33 - DNA, 729 bp, Oryza sativa
atggtggtgctcgcgaagccggcggcgctggagcagatctcgctggtgaggtcgccgtcggtggaggataacttcggcgccgggttgccggtggtggacctggccgcggacggcgcggcgggcgaggtggtgcgggcgtgcgagaggtttgggttcttcaaggtggtgagccatggcgtcggggagggcgtggtgggtaggctggaggcggaggccgtccggttcttcgcgtcgccgcaggcggcgaaggacgcgcacggccccgcgtcgccgttcgggtacgggagcaagcgcatcggccgcaatggcgacatggggtggctcgagtacctcctccaggtcgccctccaccacgacgccgacgccggcgaccaccagtgggtcaccgtccctcccgaccccgcctccttcctcgtcatcgtcggcgactcgctgcaggtgatgacgaacgggaggatgaggagcgtccggcacagggtggtggccaacaagctcaagtcgagggtgtcaatgatctacttcggagggccgccattggagcagaggatcgcgccgctgcggcagctgctggtggccggcgtcggcaacggcgaggaggaggagcagagccggtacgaggagttcacgtggggggagtacaagaaggctgcctacctctcccgcctcagcgacaaccgcctggcccccttccaccggcagccaccacctgtcgctaacccactcgcctaa

SEQ ID NO: 34 - protein, 242 aa, Oryza sativa
MVVLAKPAALEQISLVRSPSVEDNFGAGLPVVDLAADGAAGEVVRACERFGFFKVVSHGVGEGVVGRLEAEAVRFFASPQAAKDAHGPASPFGYGSKRIGRNGDMGWLEYLLQVALHHDADAGDHQWVTVPPDPASFLVIVGDSLQVMTNGRMRSVRHRVVANKLKSRVSMIYFGGPPLEQRIAPLRQLLVAGVGNGEEEEQSRYEEFTWGEYKKAAYLSRLSDNRLAPFHRQPPPVANPLA

SEQ ID NO: 35 - DNA, 1026 bp, Oryza sativa
atggaggagcacgactacgactccaactcgaacccgccgttgatgagcacgtacaagcacctgttcgtggagcagcaccgcctggacatggacatgggcgccatcgacgtcgacgagtgcgagctccctgtgatcgacctcgcggggctcatggaggcggagcaggtgtgccgcgcagacatggtgcgtgcggcgtcggaatggggcttcttccaggtgaccaaccacggcgtgccgcaggcgctgctgcgcgagctgcacgacgcacaggtggccgtgttccggcggcccttccaggagaaggtgaccgagaggctgctcggcttctcgccggagagctaccggtggggaacgccgacggccaagtgcctggagcagctgtcgtggtcggaggcctatcacatcccaatgacgacgcccaggcccagcacgagcatcagggccagggcggtgatcgaggaggtgtcgagggcgatgtacgagctggcgcagaagctggcagagatcctgatgagagggctgccgggcgccggcgagggcgagacgatggtgacgacgcgggaggagacgtgcttcctgcggctgaaccggtacccaccgtgcgccatggccatggggggcttcgggctgtgcccgcacacggacagcgacttgctcaccatcgtgcaccagcagcaggacaccgtcggcggcctccagctgctcaagggcggcaggtgggtggccgtgaagcccagccccagcaccctcatcgtcaacgtcggcgacctcctgcaggcgtggagcaacgatgtgtacaagagcgtggagcacagggtgatggccaacgccacgctggagcgcttctccatggccttcttcctctgcccctcctaccacacgctcatcatcccaagcagcagccatgtccacgacgacgatgcccattaccggagcttcaccttcggcgagtacaggaagcagatcatggaggacgtcaggagcacaggccgcaagattggactgcaccgctttcgaacccgatag

SEQ ID NO: 36 - protein, 341 aa, Oryza sativa
MEEHDYDSNSNPPLMSTYKHLFVEQHRLDMDMGAIDVDECELPVIDLAGLMEAEQVCRADMVRAASEWGFFQVTNHGVPQALLRELHDAQVAVFRRPFQEKVTERLLGFSPESYRWGTPTAKCLEQLSWSEAYHIPMTTPRPSTSIRARAVIEEVSRAMYELAQKLAEILMRGLPGAGEGETMVTTREETCFLRLNRYPPCAMAMGGFGLCPHTDSDLLTIVHQQQDTVGGLQLLKGGRWVAVKPSPSTLIVNVGDLLQAWSNDVYKSVEHRVMANATLERFSMAFFLCPSYHTLIIPSSSHVHDDDAHYRSFTFGEYRKQIMEDVRSTGRKIGLHRFRTR

SEQ ID NO: 37 - DNA, 1077 bp, Oryza sativa
atgccggccttcgccgacatcgccatcgacccgcctctggccgacagctaccgcgcgctggcgctgctccgccgcgaccgcgacggtggcattgcgccgccggctgtgcagatggtcggctcgggcggcgccgtgctggagcgcgacctgccgatggtggacctggagcggctgacgaggggcggcgcgggggagaggaaggcgtgcgcgggcgccatggcgagggcggcgtcggagtgggggttcttccagctgaccaaccacggcgtgggccgggagctgatggaggagatgaggcgggagcaggcaaggctgttccgtctgccgttcgaaaccaaggagaaggccggcctgctcaacggctcgtaccggtggggcaaccccaccgccacgtcgctccgccacctctcgtggtcggaggcgttccacgtcccgctcgccagcatctccggggcggattgcgactttggagacctcacctccttaaggggcgtgatgcaggaggtggccgaagcgatgtcgcgggtggcgaacacggtggcagcggcgctggcggaggagctgaccgggcgcggaggcggcggggcatcggcggcgccgtggttccctgcggggtgcgacgagacgacgtgcttcctgcggctcaaccggtacccggcgtgccctttcgcggcggacacgttcgggctggtgccgcacacggacagcgacttcctcaccgtcctgtgccaggaccaggtcgggggcctgcacctgatgaaggactcccggtgggtggccgtcaggccacgccccgacgccctcgtcgtcaacatcggcgatctgtttcaggcgtggagcaacaacaggtacaagagcgtggagcataaagtggtggccaacgccaagacggaccggctatcggtggcctacttcctgtgcccgtcctacgactcgcttgtcgggacatgcggcgagccatcgccatacagggccttcaccttcggggagtacaggaagaaggtgcaggaagacgtcaggacaaccgggaaaaagattggcctcccaaactttttcaagcattcttcagtacaataa

SEQ ID NO: 38 - protein, 358 aa, Oryza sativa
MPAFADIAIDPPLADSYRALALLRRDRDGGIAPPAVQMVGSGGAVLERDLPMVDLERLTRGGAGERKACAGAMARAASEWGFFQLTNHGVGRELMEEMRREQARLFRLPFETKEKAGLLNGSYRWGNPTATSLRHLSWSEAFHVPLASISGADCDFGDLTSLRGVMQEVAEAMSRVANTVAAALAEELTGRGGGGASAAPWFPAGCDETTCFLRLNRYPACPFAADTFGLVPHTDSDFLTVLCQDQVGGLHLMKDSRWVAVRPRPDALVVNIGDLFQAWSNNRYKSVEHKVVANAKTDRLSVAYFLCPSYDSLVGTCGEPSPYRAFTFGEYRKKVQEDVRTTGKKIGLPNFFKHSSVQ

SEQ ID NO: 39 - DNA, 1008 bp, Oryza sativa
atggtggtgcttgccaagggcgagctcgagcagatagccctgccggcggcgcacccgccgccagccgacgtgcgcgcgatcgacctgtccgccacgggtcccgcccgcgcggcggaggcgcgcgcgctggtggcggcgtgcgaggagcaggggttcttccgggtgacgggccacggcgtgccgccggggctggtgcgcgccgcggaggccgccgcggcgcggttcttcgcgctgccgcagcccgacaaggaggccgccgcaggggcgccgctcgggtacgccagcaagcggatcggcagcgccggcgacctcggctggatcgagtacctgctactctgcctcgcccccgccgccgccgccgcggcattgccgtgcgccgcgacgtcgcccacgcctccttgccccttacgggagcttctacgcgagtacagcgcggcggtgcggcgggtggcgtgcggcgtgctggagctgatggcggaggggctcggcgtcgggccggcggacgcgctggcgcggctggtggcgcgcgaggacagcgactccatcctcagggtgaaccactacccgccgcgccccgatcagctgggcggcggcggcgggccgaacctgacggggttcggcgagcacaccgacccgcagatcatctccgtgctccgctccaacggcgcccccgggctggagatctccctccgtgacggcgcctgggcgtccgtgccgcacgacggcgacggcgactcctttttcgtcaacgtcggcgacaccctccaggtgctaacgaacgggaggttcaggagcgtgaagcacagggtggtggtgaacagcgagaagtcgagggtgtccatggtcttcttcggcggcccgccgcccggcgagaggctggcgccgctgccggcgttattaggggacggcggccggagccggtacagggagttcacctggaaggagtacaagggcagcggctgcaagggccggctcgccgacgacaggctctgcagatttgagaactag

SEQ ID NO: 40 - protein, 335 aa, Oryza sativa
MVVLAKGELEQIALPAAHPPPADVRAIDLSATGPARAAEARALVAACEEQGFFRVTGHGVPPGLVRAAEAAAARFFALPQPDKEAAAGAPLGYASKRIGSAGDLGWIEYLLLCLAPAAAAAALPCAATSPTPPCPLRELLREYSAAVRRVACGVLELMAEGLGVGPADALARLVAREDSDSILRVNHYPPRPDQLGGGGGPNLTGFGEHTDPQIISVLRSNGAPGLEISLRDGAWASVPHDGDGDSFFVNVGDTLQVLTNGRFRSVKHRVVVNSEKSRVSMVFFGGPPPGERLAPLPALLGDGGRSRYREFTWKEYKGSGCKGRLADDRLCRFEN

SEQ ID NO: 41 - DNA, 1062 bp, Oryza sativa
atggtggcgatcacggcgccgagctccatcgagcacatcccgctggtgaggtgccccaagggcgccaatgccgggccgcaagctgtcatcccgtgcatcgacctgtcggcaccgggcgcggcggcggcggtggccgacgcgtgccgcaccctggggttcttcaaggcgaccaaccacggcgtccccgcggggctcgccgacgcgttggagtcgagcgccatggcgttcttcgcgctcccgcaccaggagaagctcgacatgtccggccccgcccggcccctcggctacggcagcaagagcatcgggtcgaacggcgacgtggggtggctggagtacctcctcctctcggccggcgccgcctcgtccggcggcgcggcgctgccggcggcgctgagggcggcggtggaggcgtacacgggggcggtgaggggggtggggtgcagggtgatggagctgatggcggaggggctggggctgggggcgtcggaggaggggaggtgcgtgctgcggcggatggtggtggggtgcgagggcagcgacgagatgctgcgggtgaaccactacccgccgtgcctcctcccgccgggccgcgaccgggacgagtgcggcgtgacgggcttcggggagcacacggacccacagatcatctccgtgctcaggtccaactgcaccgcgggcctccagatcctcctccgcggagactactcctcccctgcccgctgggtccccgtgccccccgaccccgattccttcttcgtcaacgtcggcgactccctccaagtgttgacgaatgggaggttcaggagcgtgaagcacagggtgttggcgccggagggggaggagtcgaggctgtcggtgatctacttcggcgggccagcggcgtcgcagcggatcgcgccgctggagcaggtgatgcgggagggggagcagagcctgtacagggagttcacctggggggagtacaagaaggccgcctacaagacgcgcctcggcgacaaccgcctcggcccctacgagctgcagcacgccgctgccaacgatgaggccgcgacgaagaaataa

SEQ ID NO: 42 - protein, 353 aa, Oryza sativa
MVAITAPSSIEHIPLVRCPKGANAGPQAVIPCIDLSAPGAAAAVADACRTLGFFKATNHGVPAGLADALESSAMAFFALPHQEKLDMSGPARPLGYGSKSIGSNGDVGWLEYLLLSAGAASSGGAALPAALRAAVEAYTGAVRGVGCRVMELMAEGLGLGASEEGRCVLRRMVVGCEGSDEMLRVNHYPPCLLPPGRDRDECGVTGFGEHTDPQIISVLRSNCTAGLQILLRGDYSSPARWVPVPPDPDSFFVNVGDSLQVLTNGRFRSVKHRVLAPEGEESRLSVIYFGGPAASQRIAPLEQVMREGEQSLYREFTWGEYKKAAYKTRLGDNRLGPYELQHAAANDEAATKK

SEQ ID NO: 43 - DNA, 900 bp, Oryza sativa
atgccggccatcgcggattgcgcggccgacccgccgctggcggacagctactacacgctgctccgcctcggcggggacgacgacgacgacgcgtgcacgaaggtgaccacgacgccgcagcccgtgtcggagtgcgagctcccgatgatcgacgtcggttgcctgacggcgccgaccggcgccgccgccgccgccgccgtggggcagcagcatcaagccgaggagagggcggcctgcgcggcggccatcgcggcggcggccgcggagtgggggttcttccaggtggtgaaccacggcgtcgcgcaggagctcctggaggcgatgcgccgggagcaggcgcggctgttccgcctcccgttcgaggccaagtccagcgccggcctcctcaacgactcctaccgctggggcaccccgaccgccacctcgctccgccagctctcctggtcggaggccttccacctcccgctcgccggcatctccggcaaatcctgcaactacggcgacctcacctccctcagggacgtgacgcgggaggtggcggacgcgatgtcgaggctggccagggcgctggcgcgcgtgctggcggagagcctcctgggccacgccgccggcgagcgattcccggaggggtgcgacgacgcgacgtgcttcctccggctgaaccgctacccgccgtgccccttcccaccggacgacgccttcggcctggtcccgcacaccgacagcgacttcctcaccgtgctctgccaggaccacgtcggcggcctgcagctcatgaagggctcccgctgggtcgccgtcaagcccatccccggcgccctcatcgtcaacatcggagacctttttcaggtacacccattaactccaacgttgtataaacatctcaacacaaatccctaa

SEQ ID NO: 44 - protein, 299 aa, Oryza sativa
MPAIADCAADPPLADSYYTLLRLGGDDDDDACTKVTTTPQPVSECELPMIDVGCLTAPTGAAAAAAVGQQHQAEERAACAAAIAAAAAEWGFFQVVNHGVAQELLEAMRREQARLFRLPFEAKSSAGLLNDSYRWGTPTATSLRQLSWSEAFHLPLAGISGKSCNYGDLTSLRDVTREVADAMSRLARALARVLAESLLGHAAGERFPEGCDDATCFLRLNRYPPCPFPPDDAFGLVPHTDSDFLTVLCQDHVGGLQLMKGSRWVAVKPIPGALIVNIGDLFQVHPLTPTLYKHLNTNP

SEQ ID NO: 45 - DNA, 1080 bp, Oryza sativa
ctagctactagcattctagttgtcgctcagtcatggtggttttggcgaagggggagttggagcagatcgccctgccggcggcggtgcagaagggcggcgccgccgctggccgacgtgccggaggtggacctgggcggcggcgcctgcagggcggacgcggcgcgcgcggtggtggcggcgtgcgagggacacgggttcttcaaggtgacgggccacggcgtgccggcggggctcctggcgcgcgtggaggccgcggcggcggcgttcttcgcgatggcgcagccggagaaggaggcggcggcggcggcggccgccgccgccgtgccggggagcccgttcgggtacgggagcaagaggatcggctgcaacggggacctcgggtgggtcgagtacctcctgctcggcgtcgccgccgccgccgccgcgccattgcccgcgcacggcgaggcgtcgccgtcgccgtcgtacggctcgttccgcgatatcttaaatgagtacgttgtggcggtgagagcgatgatgtgggaggtgctaaagttaatggcggaagggctaggcctgaaggagaaagatgcgttggttaggctggtctcacacgaggagagtgactccgtgctgagggtgaaccactacccaccacaccctgagttgaagcagcaaggccatggtaggttaaccgggtttggagagcacaccgaccctcagatcatctcggtgctccgatccaacgacacctctggccttgagatctctttgcgtgatggtagctgggcttctgtgcctccggatcgaaagtcgttcttcgttaatgttggagatgtcttacaggttctaacgaacgggagatttcgaagcgtgaggcaccgggtgatggtgagtagcccgcggccacgggtgtcagtcatcttcttcgccgggccgccgccacgggagcgactagcgccgctgccatggctggtggcggaggatggcgggcgccgccggtacagggagttcacctggcgggagtacaaggcttcagcctacaggaccaagctggctgagaacaggctatgtcactttgaaactgaagctgactga

SEQ ID NO: 46 - protein, 359 aa, Oryza sativa
LATSILVVAQSWWFWRRGSWSRSPCRRRCRRAAPPLADVPEVDLGGGACRADAARAVVAACEGHGFFKVTGHGVPAGLLARVEAAAAAFFAMAQPEKEAAAAAAAAAVPGSPFGYGSKRIGCNGDLGWVEYLLLGVAAAAAAPLPAHGEASPSPSYGSFRDILNEYVVAVRAMMWEVLKLMAEGLGLKEKDALVRLVSHEESDSVLRVNHYPPHPELKQQGHGRLTGFGEHTDPQIISVLRSNDTSGLEISLRDGSWASVPPDRKSFFVNVGDVLQVLTNGRFRSVRHRVMVSSPRPRVSVIFFAGPPPRERLAPLPWLVAEDGGRRRYREFTWREYKASAYRTKLAENRLCHFETEAD

SEQ ID NO: 47 - DNA, 1128 bp, Hordeum vulgare
atggtggtgccctccacgacgccggcgcggcaagagacggcgaccctgcttcttccacaggcacagccgtcccccggcggcggcgccataccgacggttgacatgtcggcgccccgcggccgcggcgcgctgtcccggcaggtggcgcgtgcgtgcgcggagcagggcttcttccgtgccgtcaaccacggcgtgcctccggcggggcccccggcacggctggacgcggccacctcggcgttcttcgcgctcgcggcacacgacaagcagcgcgccggcccgccgagcccgctcggctacggctgccgcagcatcgggttcaacggcgacgtgggcgagctggagtacctcctcctccatgccaaccccgccgccgtcgcgcacagggccagctccatcgacaccaacgatccctcacgcttcagttctgttgtgaatgagtatgtggaagcagtgaagcagcttgcatgtgacatcctggacctgttaggagaagggctagggctagaggaccccaggctcttcagcaagctcgtcacagaagctgacagtgactccctcctgaggatcaaccactaccctccatcatgcaccgttcacaagcttgaccatgatgaccaatgcaagctcaaggggatcgccaggaccaaggcagggaatggtgcgaacccgggggcgggtggccggatcgggttcggtgagcactccgacccacagctacttagcttgctccgagcaaacgatgttgatggcttgcaggtgcttctgccggacgtcaatggcaaggatgcgtggattcaggtgccagcagactcgtcggcctatttcgtcaatgttggtgatctccttcaggctctgacaaatgggaggttagtcagcatccggcacagagtaattgcaagtgcctgcaggccaaggctgtccaccatctacttcgcagccccaccactgcatgcacgaatctcggcgctcccagagatggtcacagccagctcaccacgccggtaccggtcattcacctgggctgagtacaagacggcaatgtactcgctccgactaagccacagccgcctggacctcttccatgttgatgatgacgaaagcggcaatggcagcaaaggaaaataa

SEQ ID NO: 48 - protein, 375 aa, Hordeum vulgare
MVVPSTTPARQETATLLLPQAQPSPGGGAIPTVDMSAPRGRGALSRQVARACAEQGFFRAVNHGVPPAGPPARLDAATSAFFALAAHDKQRAGPPSPLGYGCRSIGFNGDVGELEYLLLHANPAAVAHRASSIDTNDPSRFSSVVNEYVEAVKQLACDILDLLGEGLGLEDPRLFSKLVTEADSDSLLRINHYPPSCTVHKLDHDDQCKLKGIARTKAGNGANPGAGGRIGFGEHSDPQLLSLLRANDVDGLQVLLPDVNGKDAWIQVPADSSAYFVNVGDLLQALTNGRLVSIRHRVIASACRPRLSTIYFAAPPLHARISALPEMVTASSPRRYRSFTWAEYKTAMYSLRLSHSRLDLFHVDDDESGNGSKGK

SEQ ID NO: 49 - DNA, 1047 bp, Hordeum vulgare
atggtggcgtccactgcggcaccggcgtcgtcctctgcagcagcaccggcgtgccgcggcatggcgcctgccggcattcccacgatcgacatgtcggcgccggcggggcgcgcggagctgtcccgccagatggtggaggcgttcgccgagcgcggcttcttcaaggcggtcaaccacggcgtgccgccgcgggcgtccgcccggctggacgcggccagcgcggccttcttcgcgcggccggcggaggagaagcaggaggccgggccgccggacccgctgggctacggcagccggagcatcggctcccacggcgacgtcggcgagctggagtacctgatcctccacacggaccccgaggtggtggcgcgcaaggccagggccatcgacagggacgacccttcacgattcagtgaggcggtgaacgagtacgtgcaggcagtgaggcaccttgcctgccggatccttgacctgctgggcgaaggcctgggcctccgggaccctgcgtccttgagcaggctcatcacgaccacggacagcgactccctcgtccggatcaaccattacccagcttcggccgccggcgatggcggcgtgaaaaccgcaggctccgtcgggttcggggagcacactgacccacagatcctcagcgtcctccgtgccaacgacgtagatggcctgcaggtgctcctgccggacggccgcggcgaggacgcctgggtgagggttccggctgaccctgccgccttcttcatcaatgtcggtgaccttcttcaggctttgacgaacgggaagctggtgagcatccggcatagggtgatggccagcagcagcaagccaaggctgtcagctatctacttcgccgcgccggcgttgcacgagcgcatctcggcgctcccggagacggtgaccgccgccgcgccgcgccggtaccggccattcacctgggcggagtacaaaaaaacgatgtacacgcttcgtctgagccacaaccgcctcaacctcttcgcagtcgtcggtgattccggtgaagacaagcctcagatatag

SEQ ID NO: 50 - protein, 348 aa, Hordeum vulgare
MVASTAAPASSSAAAPACRGMAPAGIPTIDMSAPAGRAELSRQMVEAFAERGFFKAVNHGVPPRASARLDAASAAFFARPAEEKQEAGPPDPLGYGSRSIGSHGDVGELEYLILHTDPEVVARKARAIDRDDPSRFSEAVNEYVQAVRHLACRILDLLGEGLGLRDPASLSRLITTTDSDSLVRINHYPASAAGDGGVKTAGSVGFGEHTDPQILSVLRANDVDGLQVLLPDGRGEDAWVRVPADPAAFFINVGDLLQALTNGKLVSIRHRVMASSSKPRLSAIYFAAPALHERISALPETVTAAAPRRYRPFTWAEYKKTMYTLRLSHNRLNLFAVVGDSGEDKPQI

SEQ ID NO: 51 - DNA, 981 bp, Hordeum vulgare
atggtggttctcgccggcacgcctgccgtcgatcacatcccgctcctcaggtcccccgaccccggggacaacttctccggcatgccggtcgtggacctgtccagacctggcgcgccgcgggcaatcgccgacgcgtgcgagcgcttcggcttcttcaagctcgtcaaccacggggtggccctggacgcgatggaccggctcgagtcggaggccgtgaggttcttctcgctgccgcaggccgacaaggaccgctccggcccggcctacccgttcggctacggcagcaagcgcatcgggctcaatggcgacatggggtggctcgagtacctcctcctcgccgtcgactccgcctcgctccccgccgcctccgccgtcccgtcctgcgcgctcttccgggcggcgctgaacgagtacatcgcggcggtgaggaaggtggcggtgcgggtgatggaggcgatggcggaggggctgggcattgcgcaggcggacgcgctgagcgcgatggtggcggtggagggcagcgaccaggtgttcagggtgaaccactacccgccgtgccacgcgctgcaggggctcggctgcagcgccaccggcttcggcgagcacaccgacccgcagctcatctccgtgctgcgctccaacggcacgtccggcctgcagatcgcgctccagagcggccactgggtgtccgtgccctccgaccgcgacgccttcttcgtcaacgtcggcgactccttgcaggtgctgaccaacgggaggttcaagagcgtgaagcacagggtggtggccaacagcctaaagtctagggtttccatgatctactttggagggccagcattgacacagaggattgcaccattgccgcagctgctgagagagggagagcagagcctgtacaaggacttcacatggggcgagtacaagaaggctgcctacaactccaggctcggggacaacaggctggctcacttccacaggtag

SEQ ID NO: 52 - protein, 326 aa, Hordeum vulgare
MVVLAGTPAVDHIPLLRSPDPGDNFSGMPVVDLSRPGAPRAIADACERFGFFKLVNHGVALDAMDRLESEAVRFFSLPQADKDRSGPAYPFGYGSKRIGLNGDMGWLEYLLLAVDSASLPAASAVPSCALFRAALNEYIAAVRKVAVRVMEAMAEGLGIAQADALSAMVAVEGSDQVFRVNHYPPCHALQGLGCSATGFGEHTDPQLISVLRSNGTSGLQIALQSGHWVSVPSDRDAFFVNVGDSLQVLTNGRFKSVKHRVVANSLKSRVSMIYFGGPALTQRIAPLPQLLREGEQSLYKDFTWGEYKKAAYNSRLGDNRLAHFHR

SEQ ID NO: 53 - DNA, 1029 bp, Hordeum vulgare
atggtggtcctcgcgaagccggcggcgctggagcagatcgcgctgatgaggactcctgagccgtgggagagcttctcgggcgtcccggccgtggacctgtccagccccggcgccgcggcggacgtggtgcgcgcgtgcgagcggttcgggttcttcagcgtcgtgaaccacggcgtgccggcgggcgtggtggaccggctggaggcggaggccgtccggttcttcgcgtctacgcaggcggagaaggacgcgtcgggccccgccgacccgttcggatacgggagcaagcgcatcgggcgcaatggtgacatggggtgggtcgagtacctgctcctcgccatcgaccgcgacaccctctccaaggcctccccggcgccgtcgtccgcgctgagggaagcgatcaacgcgtacgtgtccgccatgcgcgggctggcgaggacggtgctggagatggtggcggaggggctgggcgtgtcgccgcggggcgcgctggcggacatggtgacgggcgaggccagcgaccaggtgttccgggtgaaccactacccgccctgcccgctgctgcaggggctgccgcccaactgcagcgtgaccgggttcggcgagcacacggacccgcagctggtgtccatcctgcactccaacggcacggccgggcttcaggtcgcgctccacgacgggcgctgggtgtccgtcccgcccaaccgcgacgccttcttcgtcaacgtcggcgactccctccaggttctgacgaatgggaggctgaggagtgtgcggcaccgggtggtggccggcaacgggctcaagtcccgcgtgtcgatgatctacttcgccgggccaccgctggcgcagaggattgcaccgctgcagcagctgctggcggggacgcagagcttgcccctctacagggacttcacatggggagaatacaagaaggcggcctaccgctctcgcctcggcgacaaccgcctggcccccttcgagacgccacttgtcgccatgccacacgccgcccaccaccggtcctag

SEQ ID NO: 54 - protein, 342 aa, Hordeum vulgare
MVVLAKPAALEQIALMRTPEPWESFSGVPAVDLSSPGAAADVVRACERFGFFSVVNHGVPAGVVDRLEAEAVRFFASTQAEKDASGPADPFGYGSKRIGRNGDMGWVEYLLLAIDRDTLSKASPAPSSALREAINAYVSAMRGLARTVLEMVAEGLGVSPRGALADMVTGEASDQVFRVNHYPPCPLLQGLPPNCSVTGFGEHTDPQLVSILHSNGTAGLQVALHDGRWVSVPPNRDAFFVNVGDSLQVLTNGRLRSVRHRVVAGNGLKSRVSMIYFAGPPLAQRIAPLQQLLAGTQSLPLYRDFTWGEYKKAAYRSRLGDNRLAPFETPLVAMPHAAHHRS

SEQ ID NO: 55 - DNA, 1026 bp, Hordeum vulgare
atggtggtccttgccaagggcgagctggagcagatagccctgccggcggcgcagccgccgctggcccacgtgcgggcgatcgacctgtccgccgccccggggcccggccgcgacgccgcggcgcgcgcgctggtgtccgcgtgcgaggagcagggcttcttcaaggtgaccggccacggggtgccgctggagctcgtgcgcgccgtggaggcggccgcggcggagttcttcgcgctgccgcaggccgagaaggaggccgccgccggccggccgctcgggtacggcagcaagcggatcggcgtctccggcgacctcgggtggatcgagtacctcctgctgggcgtcacccccgccggcgcgctgcccgccgcctccttcgcgtcctggacattgccgtgcgcgggcgccgccgtggcgtcgtcgtccgagcacccctgccccttacgggatcttctggaggagtacgcggcggcggtgcggcggatggcgtgcggcgtgctggagctgatggcggaggggctcgggatcgggccggcggacgcgctgtcccggctggtgtcggacggtgagagcgacaacatgctccgggtgaaccactacccgcctcggccggagatgcagggctgcctcctgacggggttcggcgagcacacggacccgcagatcatctccgtgctccgctccaacggcacgtccgggctggagatctgcgcgcgcgacggcgaatggacctccgtgccgcccgaccccgacgccttcttcgtcaacgtcgccgatgccctgcaggtgctgacgaacgggaggttcagcagcgtgaagcacagggtggtggtgagcagcgagaggccgagggtgtccatgatcttcttcggcggcccgccgatgggcgagaggctggcgccgctgcggcagctgcttggggatggcggccggagcaagtacagggagttcacctggaaggagtacaagagcagcacccacaagggcaggctcgcgaccgaccgcctctgcagcttcgagaactag

SEQ ID NO: 56 - protein, 341 aa, Hordeum vulgare
MVVLAKGELEQIALPAAQPPLAHVRAIDLSAAPGPGRDAAARALVSACEEQGFFKVTGHGVPLELVRAVEAAAAEFFALPQAEKEAAAGRPLGYGSKRIGVSGDLGWIEYLLLGVTPAGALPAASFASWTLPCAGAAVASSSEHPCPLRDLLEEYAAAVRRMACGVLELMAEGLGIGPADALSRLVSDGESDNMLRVNHYPPRPEMQGCLLTGFGEHTDPQIISVLRSNGTSGLEICARDGEWTSVPPDPDAFFVNVADALQVLTNGRFSSVKHRVVVSSERPRVSMIFFGGPPMGERLAPLRQLLGDGGRSKYREFTWKEYKSSTHKGRLATDRLCSFEN

SEQ ID NO: 57 - DNA, 1050 bp, Hordeum vulgare
atggtggttcttgccaagggcgagctggagcagatcgcgctcccggccgtgcacaagacagcaccgccactggccgacttgccggaggtcgacctttccgtggcaagaagcggctctgagggacgggcggccgccgcacgcgcggtggcggcggcgtgcgaggagcatgggttcttcaaggtgacgggccacggcgtgccagcagagctcctggcgcgcgtcgagaacgccgctgccgcgttcttcgcgctctcgcagcgggacaaggaggcggcgatgtcggccgcgacgccgggcagtccgttcggctacgcgagcaagcggataggcaacaacggcgacctcgggtgggtcgagtatctcctgctcggtgtcaccgccgcgggcgccgaggccggcgcgccattgtccgtgcccgaagaggtggtgccgtcagcgtcgctctgctctttccgggaccttctgaacgagtacacggtggccgtgaggaggatgacctgccagttgctggagctgatggcggagggcctgggcatggaagacagggacgcgttcacgaggctggtcctgcacaaggagagcgactcgatgctgcgagtgaaccactacccgccgcgccccgagctgaagcagcaccacggtggcagggtcaccgggttcggcgagcacaccgacccccagatcatctccgtgctccgctccaacgccacctccggcctagagatcgccctgcgcgacggcgactgggtctccgtgccgccggaccagacctccttcttcgtcaatgttggcgacgccttgcaggtactcacgaacgggaggttccggagcgtgagacatcgagtgatggtgaacaacatccaaccgcgggtgtcggtgatcttcttcggcggcccgccgccgcgggagacgctcgcgccgctaccacaactcgtcggggaaggcgggcgcagccgctacaaggaattcacatggtgtgagtacaaagcctcggcgtatggaaccaagctggcggcgaacaggctctgccacttcgagaccaccaactag

SEQ ID NO: 58 - protein, 349 aa, Hordeum vulgare
MVVLAKGELEQIALPAVHKTAPPLADLPEVDLSVARSGSEGRAAAARAVAAACEEHGFFKVTGHGVPAELLARVENAAAAFFALSQRDKEAAMSAATPGSPFGYASKRIGNNGDLGWVEYLLLGVTAAGAEAGAPLSVPEEVVPSASLCSFRDLLNEYTVAVRRMTCQLLELMAEGLGMEDRDAFTRLVLHKESDSMLRVNHYPPRPELKQHHGGRVTGFGEHTDPQIISVLRSNATSGLEIALRDGDWVSVPPDQTSFFVNVGDALQVLTNGRFRSVRHRVMVNNIQPRVSVIFFGGPPPRETLAPLPQLVGEGGRSRYKEFTWCEYKASAYGTKLAANRLCHFETTN

SEQ ID NO: 59 - DNA, 1173 bp, Hordeum vulgare
atgaccacaactgcaaacgttcccctgctccttacttctcttctgctcctgctctgcttcacttacatatcggtgctctgcgagatcgtcctgctggccatggtgggggtcacggtgcctatctccgtggacacgatcccgctggtgaaatgtgcacatgccgcggcggccgcggtgccgagcgtcgacctgtcggcgccggacgcgggggcggccgtggcggccgcgtgccgccgcgtgggcttcttcagggcgaccaaccacggcgtgccggcggccctgaccgacgcgctggaggcccgcgccgaggccttcttcgcgctgccgcacgaggacaagctggaggcgtcggcgcggcccttcggctacggcagcaagagcatcggctgcaacggcgacgtgggctggctcgagtacatccttctctccgtcgggtccggctccgtcgccgccgcctgcctgccgccgtcgctccgggcggcgctggaggagtacacggacgcggtccgcgaggtgggagcgcgggtgctggagctgatggcggacggtctcggcgtggcggaggagcaccgcggcgtgctgcggcggatggcggaggcggacggagccgacgagatggtgcgcgtaaaccactacccgccgtgcccctgccccctggcagctgggcagcgcggcgtgacggggttcggggagcacacggacccgcagatcatctccgtgctcaggtccaaccgcaccgggggcctccagatcgcgctcccggacggccactgggtacccgtggcccccgaccccgattccctcttcgtcaatgtcggggactccctccaggtgctgacgaacgggcggttccggagcgtgaagcaccgggtggtggcgccggcggaggggcagcagccgcggctgtcggtgatctacttcggcgggccggcgccgacgcagcggatcgcgccgctgccggagctgatgcgggaaggggagcagagcctgtacagggacttcacctgggccgagtacaagaaggccgcctacaagtcccgcctcggcgaccaccgcctaggcccattcgagctccccgccgccgaaaaacccaccagctccgacaagcactgcggcagcaacgccgtccagctgccggcgccggcgccccttcacgtggcacgagtgcactag

SEQ ID NO: 60 - protein, 390 aa, Hordeum vulgare
MTTTANVPLLLTSLLLLLCFTYISVLCEIVLLAMVGVTVPISVDTIPLVKCAHAAAAAVPSVDLSAPDAGAAVAAACRRVGFFRATNHGVPAALTDALEARAEAFFALPHEDKLEASARPFGYGSKSIGCNGDVGWLEYILLSVGSGSVAAACLPPSLRAALEEYTDAVREVGARVLELMADGLGVAEEHRGVLRRMAEADGADEMVRVNHYPPCPCPLAAGQRGVTGFGEHTDPQIISVLRSNRTGGLQIALPDGHWVPVAPDPDSLFVNVGDSLQVLTNGRFRSVKHRVVAPAEGQQPRLSVIYFGGPAPTQRIAPLPELMREGEQSLYRDFTWAEYKKAAYKSRLGDHRLGPFELPAAEKPTSSDKHCGSNAVQLPAPAPLHVARVH

SEQ ID NO: 61 - DNA, 1095 bp, Hordeum vulgare
atggtggcgatcacggtgcccatctcggtggacacgatcccgctgctgaaatgcgtgaatgcggcgacggcggcggtccccagcgtcgacctgtcggcgccgggcgctgcggcggccgtggcggacgcgtgccgcgccgtgggcttcttcagggcgaccaaccacggcgtgccggccgccctcacggacgcgctggaggaacgcgccgcggccttcttcgcgctgccgcacaaggacaagatggacgcgtcggcgcggcccttcggctacggcagcaagaacatcggctgcaacggcgacgtgggctggctcgagtacatcctcctatccgtccgttccggctccgtcgccgccgcctccctgccgccgtcgctccgggctgcgcttgaggagtacacggacgcggtgcgcgaggtgggagcgcgggtgctggagctcatggcggacgggctcggcgtcgcggaggagcaccgcggcgtgctgcggcggatggtggcgccggacgatgccggaggggctgacgagatggtgcgcgtgaaccactacccgccgtgtccctcgtccctggcggtggggcagcgcggcgttacggggttcggggagcatacggacccgcagatcatctccgtgctccggtccaaccgcaccgccgggctccagatcatgctcccagacggccgctgggtccccgtagcccccgacactgattccctcttcgtcaacgtcggggactccctccaggtgctgacgaacgggcggttccggagcgtgaagcaccgggtggtggcgccggcggaggggcagcagccgcggctgtcggtgatctacttcggcgggccggcgccgacgcagcggatcgcgccgctgccggagctgatgcgggaaggggagcagagcctgtacagggacttcacctgggccgagtacaagaaggccgcctacaagtcccgcctcggcgaccaccgcctaggcccattcgagctccccgccgcagccaccgcccaagaatccactaccaaggcggaccaccactgcagcagcaacgctgccgtccaggcgccggcggcggcgcctcacgtcgcacgagtgcattag

SEQ ID NO: 62 - protein, 364 aa, Hordeum vulgare
MVAITVPISVDTIPLLKCVNAATAAVPSVDLSAPGAAAAVADACRAVGFFRATNHGVPAALTDALEERAAAFFALPHKDKMDASARPFGYGSKNIGCNGDVGWLEYILLSVRSGSVAAASLPPSLRAALEEYTDAVREVGARVLELMADGLGVAEEHRGVLRRMVAPDDAGGADEMVRVNHYPPCPSSLAVGQRGVTGFGEHTDPQIISVLRSNRTAGLQIMLPDGRWVPVAPDTDSLFVNVGDSLQVLTNGRFRSVKHRVVAPAEGQQPRLSVIYFGGPAPTQRIAPLPELMREGEQSLYRDFTWAEYKKAAYKSRLGDHRLGPFELPAAATAQESTTKADHHCSSNAAVQAPAAAPHVARVH

SEQ ID NO: 63 - DNA, 1146 bp, Sorghum bicolor
atggtggtgccttccacgacgccggtggtggtgcgccaagaaacgccgccgccgccgctgccgctgccgccgtcccacgacggcataataggcataccgacggtggacatgtcggcgccgggcggccgcggcgcgctgtcgcggcaggtggcgcgcgcgtgcgcggagcacggcttcttccgcgccgtgaaccacggcgtggcggtggcgccagcggcaggccccgccgcgcggctggacgccgccgccaggacgttcttcgcgctgccgccgcacgacaagcagcgcgccggcccgcccagcccgctcggctacggctgccgcaccatcggcttcaacggcgacgccggcgagctcgagtacctgctgctccacgccaaccccgccgccgtcgcgcacagggccaggtccatcgacactgacgacccctcgcgcttcagtaatgtggtgaacgagtatgtgggagcaatgaggcagcttgcatgtgagatcctggacctgttaggagaggggctagggctcaaggaccccagatccttcagcaagctcatcactgacacagacagcgactcactcctgaggatcaaccactaccctccagcatgcaccattcagaagcttgaccatgacaaccaatgcaagatgaagagcagtttcagaatcaagactggcaatggtgtgaaccagtcagcaggtgcacggatcggattcggggagcattcagacccgcagattcttagcttgctccgatcaaacgatgttgacggccttcaggtgcttctgaactgcgacggcagggaggtgtgggttcaggtgccatccgatccatcagcattctttgtcaatgttggtgatctcctccaggctttgacaaatgggaaggtgataagtgtccggcacagggtaattgcaaactcctgcagggcaaggctgtccacaatctacttcgctgcgccgccactgcatgcacgaattttggccctcccagagacaatcacagccaactcaccccgccagtaccggcccttcacctgggccgagtacaagaagacaatgtactccctccgcctgagccacagccgcctcaacctcttccacatcgaccatgatgaccacagcaatgtcggcaaaggagaacaagaatag

SEQ ID NO: 64 - protein, 381 aa, Sorghum bicolor
MVVPSTTPVVVRQETPPPPLPLPPSHDGIIGIPTVDMSAPGGRGALSRQVARACAEHGFFRAVNHGVAVAPAAGPAARLDAAARTFFALPPHDKQRAGPPSPLGYGCRTIGFNGDAGELEYLLLHANPAAVAHRARSIDTDDPSRFSNVVNEYVGAMRQLACEILDLLGEGLGLKDPRSFSKLITDTDSDSLLRINHYPPACTIQKLDHDNQCKMKSSFRIKTGNGVNQSAGARIGFGEHSDPQILSLLRSNDVDGLQVLLNCDGREVWVQVPSDPSAFFVNVGDLLQALTNGKVISVRHRVIANSCRARLSTIYFAAPPLHARILALPETITANSPRQYRPFTWAEYKKTMYSLRLSHSRLNLFHIDHDDHSNVGKGEQE

SEQ ID NO: 65 - DNA, 777 bp, Sorghum bicolor
atggtagtgccatcggcggcaggccgggagatggcgccggaatcgctcccgctcggcattatcccgacggtggacatgtcggcgccgtgcggcgagctggcgcgccggctggtgcgcgcgtgcgcggagcgcggcttcttcaaggccgtcaaccacggcgtgccgccgcgggtgtccgcgcggatggacgccgccgcgtcggcgttcttcgcgcgccccgggcaggcgaagcaggcggcggggccgcccgacccgctcgggtatggcagccggaacattggtgccaacggcgacgtcggcgagctggagtacctcatcctgcacgccgatcccggcgcagtggcgcgcaaggccaaggtcatcgacaaggacgatccttcgcggttcagtgtcgcagtgaacgagtacgtgggcgcagtgcggcacctcgcgtgccgggtcctggacctcctcggcgagggcctcggcctcagggacccgacgtccttgagccgcctcatctccgccgtcgacagcgactccctcctcaggatcaaccactaccctacgtccaggtccagcgcggcggacatctccaccaagggcatcgggttcggcgagcacaccgacccgcagatcctcagcctgctccgcgccaacgacgtcgacggcctgcaggtgctgctgcccgacggccacggcggcggcgacgagcagtgggtccaggtgccggctgacccgtccgccttcttcatcaacgtcggtgatctccttcagaataatatgatactgttctga

SEQ ID NO: 66 - protein, 258 aa, Sorghum bicolor
MVVPSAAGREMAPESLPLGIIPTVDMSAPCGELARRLVRACAERGFFKAVNHGVPPRVSARMDAAASAFFARPGQAKQAAGPPDPLGYGSRNIGANGDVGELEYLILHADPGAVARKAKVIDKDDPSRFSVAVNEYVGAVRHLACRVLDLLGEGLGLRDPTSLSRLISAVDSDSLLRINHYPTSRSSAADISTKGIGFGEHTDPQILSLLRANDVDGLQVLLPDGHGGGDEQWVQVPADPSAFFINVGDLLQNNMILF

SEQ ID NO: 67 - DNA, 1005 bp, Sorghum bicolor
atggtcgtcctcgcgaagccaccgccggcgctcgaccaaatctccctgcttcgatgcccgcagcccggggacgcggcgtccttcttcggcgtgccggccgtcgacctgtccagccccggcgcggctctggccgtggtggacgcgtgcgagcggttcggcttcttcaaggtggtgaaccacggcgtgccaacgggcgtcgtggatcggctggaggccgaggccgtcaggttcttcgcgtcgccgcaggcggacaaggacgcgtgcggccccgccaacccgctcgggtacgggaacaagcgcatcggccgcaatggcgacatggggtggctcgagtacctcctcctcgccctcgacggcgcctcctcggtgtccaaggcctcccctgtcccgtcatcctcgctgcgggacgcggtaaaccagtacgtcgccgccgtgcggggactggcgacgtcggtgctggaggcggtggcggaggggctgggcgtggcgccgagggacgcgctgagcggcatggtgacggacgcggcgagcgaccaggtgttccggatcaaccactacccggcgtgcccgctgctgcagcgcctgccggactcgtgcggcgtcaccggcttcggcgagcacacggacccgcagctggtgtccgtgctgcgctccaacggcacggccggcctgcaggtcgcgctccacgacgacggggggcggtgggtgcccgtgccgcccgaccgcgacgccttcttcgtcatcgtcggcgactcgctgcaggtcctgacgaatgggaggctgaaaagtgtgcggcaccgggtggtggccaacagcctgaagccgcgggtgtccatgatctacttcgcgggaccggcgccggcgcagcggatcgcgccattgccgcaggtgctggggcacggcgagcagagcttgtacagggacttcacatggggcgactacaagaaggctgcctaccgatcgcgcctcggagacaaccgcctggaccccttccgcatccagtga

SEQ ID NO: 68 - protein, 334 aa, Sorghum bicolor
MVVLAKPPPALDQISLLRCPQPGDAASFFGVPAVDLSSPGAALAVVDACERFGFFKVVNHGVPTGVVDRLEAEAVRFFASPQADKDACGPANPLGYGNKRIGRNGDMGWLEYLLLALDGASSVSKASPVPSSSLRDAVNQYVAAVRGLATSVLEAVAEGLGVAPRDALSGMVTDAASDQVFRINHYPACPLLQRLPDSCGVTGFGEHTDPQLVSVLRSNGTAGLQVALHDDGGRWVPVPPDRDAFFVIVGDSLQVLTNGRLKSVRHRVVANSLKPRVSMIYFAGPAPAQRIAPLPQVLGHGEQSLYRDFTWGDYKKAAYRSRLGDNRLDPFRIQ

SEQ ID NO: 69 - DNA, 1101 bp, Sorghum bicolor
atggtggcgatcacggcgccgagctcgatcgagcagatcccgctggtgcagtgtcccagggccaatgcgagcgcggccatcccgtgcgtggacctgtcggcgccgggcgcggccgcggcggtggccgacgcgtgccgcggcgtgggcttcttcagggcgaccaaccacggcgtgccggcgcgcgtggtcgaggcgctggaggcccgcgcgatggcgttcttcgcgctgcccgcccaggagaagctggacatgtccggcgccgctcgccccatggggtacggcagcaagcgcatcggctccaacggcgacgtcgggtggctcgagtacctcctcctctccgtcagcgccaacaccgtcaagatctcctccctgccgccctcgctccgagcggcattggaggagtacacggcggcggtgagggaggtgtgcgggcgggtgctggagctcatagcggaggggctgggcgtggacaggtccctgctgcgtgcgatggtggtggggcgggaaggcagcgacgagctggtgcgggtgaaccactacccgccctgcccgctgctgccgccggtggactgcggcgtgacggggttcggggagcacacggacccgcagatcatctccgtgctcaggtccaacagcacggctggcctgcagatcaagctccgggacggcaggtgggtccccgtgccccccgccccggaatccttcttcgtcaacgtcggagacgcgctgcaggtcctgacgaacgggcggttcaagagcgtgaagcaccgggtggtggcgccggaaggggcgcagtcacggctgtcggtgatctacttcggcgggccggcgccgtcgcagcggatcgcgccgctgccggaggtgatgcgggacggggagcagagcctgtaccgggagttcacctgggccgagtacaagaccgccatgtacaagacccgcctcgccgaccaccgcctcggccccttcgagctgcgcgccaccaacaccaacagctgcgtgccgccgccgccgccgcccagcgtcgacccgtactgcaacggcagcggcatctgcatgccgcagccgccgccgcagcagcagcaggtggcagaggtgcactag

SEQ ID NO: 70 - protein, 366 aa, Sorghum bicolor
MVAITAPSSIEQIPLVQCPRANASAAIPCVDLSAPGAAAAVADACRGVGFFRATNHGVPARVVEALEARAMAFFALPAQEKLDMSGAARPMGYGSKRIGSNGDVGWLEYLLLSVSANTVKISSLPPSLRAALEEYTAAVREVCGRVLELIAEGLGVDRSLLRAMVVGREGSDELVRVNHYPPCPLLPPVDCGVTGFGEHTDPQIISVLRSNSTAGLQIKLRDGRWVPVPPAPESFFVNVGDALQVLTNGRFKSVKHRVVAPEGAQSRLSVIYFGGPAPSQRIAPLPEVMRDGEQSLYREFTWAEYKTAMYKTRLADHRLGPFELRATNTNSCVPPPPPPSVDPYCNGSGICMPQPPPQQQQVAEVH

SEQ ID NO: 71 - DNA, 1062 bp, Sorghum bicolor
atggtggtcctcgccaagggtgagctcgagcagatcgccctgccggcggcggagccgccgccagccgacgtgcggtcggtggacctgtcggccccggcgggccccgcgcgcgaggccgcagcgcgcgcgctggtggcggcgtgcgaggagcacgggttcttccgggtgacgggccacggcgtgccgccggagctcgtgcgcgccgcggaggccgcggcggccgggttcttcgcgcagccgcaggacgagaaggacgaggaggctcccacgctcgggtacggcagcaagcgcatcggcggcaacggcgacctcgggtgggtcgagtacctcctgctcggcgtcacccccgccggcgccgccgtgccggctgcctccgcgtcctcctcgacattgccgtgcgctgccgccgccgccgccgccaccgcatcgtcgccgtccgcgccggccgggtcggccgggctgttacgggaccttctggacgagtacacggtggcggtgcggcggatggcgtgcgcggtgctggagctgatggcggaggggctgggcatcgccggcggcgccggggacggggacgtgctggcgcggctggtgacgcgcgcggacagcgactgcatgctgcgggtgaaccactacccgccgcggccggcgttgaacccctgcagcctgacggggttcggcgagcacacggacccgcagatcatctcggtgctccgcgccaacggcacctccggcctggagatcgcgctgcgggacggcgcctgggcctccgtcccgcccgacggcgacggcttcttcgtcaacgtcggcgacaccctgcaggtgttgacgaacgggaggttcaggagcgtgaggcacagggtggtggtgaacagcgagaagtcccgggtgtccatggtcttcttcggcgggccgccgccgggcgagaggctggcgccgctgccgcagctgctgggcgacggcggccggagccggtaccgggacttcacctggagcgagttcaagaacagcgggtgcaggaccaggctcgcggaagaccggctgtcccgcttcgagaacaagtag

SEQ ID NO: 72 - protein, 353 aa, Sorghum bicolor
MVVLAKGELEQIALPAAEPPPADVRSVDLSAPAGPAREAAARALVAACEEHGFFRVTGHGVPPELVRAAEAAAAGFFAQPQDEKDEEAPTLGYGSKRIGGNGDLGWVEYLLLGVTPAGAAVPAASASSSTLPCAAAAAAATASSPSAPAGSAGLLRDLLDEYTVAVRRMACAVLELMAEGLGIAGGAGDGDVLARLVTRADSDCMLRVNHYPPRPALNPCSLTGFGEHTDPQIISVLRANGTSGLEIALRDGAWASVPPDGDGFFVNVGDTLQVLTNGRFRSVRHRVVVNSEKSRVSMVFFGGPPPGERLAPLPQLLGDGGRSRYRDFTWSEFKNSGCRTRLAEDRLSRFENK

SEQ ID NO: 73 - DNA, 993 bp, Sorghum bicolor
atggtggtgctcgccaacccgcctgtcgtcgaccagatcccgctgctgcggtccccggggcccagggacaccttctcgggcgtgccggtcgtcgacctgtccagccccgccgcggcgcgcgcgatcgtcgacgcctgcgagcgcttcggcttcttcaaggtcgtcaaccacggcgtgcccgcggccaccatgggcagggccgagtccgaggccgtcaggttcttcgcgcaggcgcaggccgacaaggaccgcgccggcccggcgtacccgttcggctacggcagcaagcggatcgggctcaatggcgacatggggtggctcgagtacctcctcctcgccgtcgactccgcgtcgctctccgacgcctgccccgtcccctccaccgccgccttccggagcgcgctgaacgagtacgtcgcggcggtgcggaaggtggcggtgcgcgtgctggaggcgatggcggaaggcctgggcattgcggacgcggccgcgctgagctcgatggtgaccggcgccggcggcgaccaggtgttccgcgtgaaccactacccgccgtgcccggcgctgcagggcctgggctgcagcgccacgggcttcggcgagcacaccgacccgcagctcatctccgtgctccgctccaacggcacgtccggcctgcagatcgcgctccgcgacggcgcgcagtgggtgtccgtgccctccgaccgcgacgccttcttcgttaacgtcggcgactcgttgcaggtgctgacgaacgggaggttcaagagcgtgaagcaccgggtggtgaccaacagcctcaagtctagggtttccttcatctacttcgcgggaccggcgctggagcagcggatcgtgccgctgccggagctgctggcggagggcgaggagagcctgtacaaggagttcacgtggggcgagtacaagaaggccgcgtacaagacgaggctcggggacaacaggctggcccagtttgagaagcgtagcatctag

SEQ ID NO: 74 - protein, 330 aa, Sorghum bicolor
MVVLANPPVVDQIPLLRSPGPRDTFSGVPVVDLSSPAAARAIVDACERFGFFKVVNHGVPAATMGRAESEAVRFFAQAQADKDRAGPAYPFGYGSKRIGLNGDMGWLEYLLLAVDSASLSDACPVPSTAAFRSALNEYVAAVRKVAVRVLEAMAEGLGIADAAALSSMVTGAGGDQVFRVNHYPPCPALQGLGCSATGFGEHTDPQLISVLRSNGTSGLQIALRDGAQWVSVPSDRDAFFVNVGDSLQVLTNGRFKSVKHRVVTNSLKSRVSFIYFAGPALEQRIVPLPELLAEGEESLYKEFTWGEYKKAAYKTRLGDNRLAQFEKRSI

SEQ ID NO: 75 - DNA, 1167 bp, Sorghum bicolor
atggcgagctgcatgcaggagtggccggagcccgtcgtccgcgtgcaggcgctcgccgagagcggcctgtccgtcatcccgcgctgctacgtcaagccgccgtgcgaccgccccgtcgtcgtggccccggcggcgccaacggcagtcaaggagacgaattcgaataaggcggccgaggcctcggacatcagcattccggtcgtcgacctcggcgagctgctgctgcaggcgaaggacgccggcgccggcggccttgtcgggaacgtcgtcaccgaggccgtcgcgtccgcgtgccgcgagtggggattctttcaggtggtcaaccacggggtgcgccccgagctgatgcgcgcggcgcgggagtcctggcgcggcttcttccgccgcccgctcgcggagaagcagcgctacgccaactcgccgcgcacgtacgagggctacggcagccgcctcggcgtccagaagggcgccgtcctcgactggggcgactacttcttcctccacctcgcgccggaggcggctaagagcgcggcaaacttctggccggccaaccccagcaactgcaaggaggtgtcggaggagtacgggcgcgaggtggtgcgggtgtgcgagctgctgatgcgggtgctgtccgtgagcctagggctggacgaggcgcacttccagcgggcgttcggcggggcggactgcggcgcgacgctgcgcgccaactactacccgcggtgcccgcagccggacctgacgctgggcctctccgcgcactcggacccgggcgccctcaccgtcctcctcgccgacgagaacgtccgcggcctgcaggtccgccgcggcgacgacggcgagtgggtcaccgtgcagcccgtccgcgacgccttcatcgtcaacgtcggcgaccaagtccagatactgagcaactccgtgtacaagagcgtggagcaccgggtggtcgtgaacgccgaggaggagcgcatatccctcgcgctcttctacaaccccaagggcgacgtccccatctccccggcgccagggctggtcaccgccgggaacctgccggcgctctacccgccgatgaccttcgacgagtacaggctctacatcaggaataagggcgccaggggcaaggcgcagatcgaggctctcaagggccaggcatcgccagaaaaataa

SEQ ID NO: 76 - protein, 388 aa, Sorghum bicolor
MASCMQEWPEPVVRVQALAESGLSVIPRCYVKPPCDRPVVVAPAAPTAVKETNSNKAAEASDISIPVVDLGELLLQAKDAGAGGLVGNVVTEAVASACREWGFFQVVNHGVRPELMRAARESWRGFFRRPLAEKQRYANSPRTYEGYGSRLGVQKGAVLDWGDYFFLHLAPEAAKSAANFWPANPSNCKEVSEEYGREVVRVCELLMRVLSVSLGLDEAHFQRAFGGADCGATLRANYYPRCPQPDLTLGLSAHSDPGALTVLLADENVRGLQVRRGDDGEWVTVQPVRDAFIVNVGDQVQILSNSVYKSVEHRVVVNAEEERISLALFYNPKGDVPISPAPGLVTAGNLPALYPPMTFDEYRLYIRNKGARGKAQIEALKGQASPEK

SEQ ID NO: 77 - DNA, 1041 bp, Sorghum bicolor
atggtagtgccatcggcggcaggccgggagatggcgccggaatcgctcccgctcggcattatcccgacggtggacatgtcggcgccgtgcggcgagctggcgcgccggctggtgcgcgcgtgcgcggagcgcggcttcttcaaggccgtcaaccacggcgtgccgccgcgggtgtccgcgcggatggacgccgccgcgtcggcgttcttcgcgcgccccgggcaggcgaagcaggcggcggggccgcccgacccgctcgggtatggcagccggaacattggtgccaacggcgacgtcggcgagctggagtacctcatcctgcacgccgatcccggcgcagtggcgcgcaaggccaaggtcatcgacaaggacgatccttcgcggttcagtgtcgcagtgaacgagtacgtgggcgcagtgcggcacctcgcgtgccgggtcctggacctcctcggcgagggcctcggcctcagggacccgacgtccttgagccgcctcatctccgccgtcgacagcgactccctcctcaggatcaaccactaccctacgtccaggtccagcgcggcggacatctccaccaagggcatcgggttcggcgagcacaccgacccgcagatcctcagcctgctccgcgccaacgacgtcgacggcctgcaggtgctgctgcccgacggccacggcggcggcgacgagcagtgggtccaggtgccggctgacccgtccgccttcttcatcaacgtcggtgatctccttcaggccctgacaaacgggcggttggtgagcatccggcacagggtgatggccagcaccaccaggccgcggctgtccaccatctacttcgccgcgccgccgctcgacgcccgtgtcgcggcgctgccggagacggtgactgccggcgcgccgcggcggtacaggaccttcacgtgggcggagtacaagaaggccatgtacgcgctccgcctcagccacaaccgtcttgatctcttccacgcaacctctggcagcagccgcgatgtcatcgatgatgatcacgaacaataa

SEQ ID NO: 78 - protein, 346 aa, Sorghum bicolor
MVVPSAAGREMAPESLPLGIIPTVDMSAPCGELARRLVRACAERGFFKAVNHGVPPRVSARMDAAASAFFARPGQAKQAAGPPDPLGYGSRNIGANGDVGELEYLILHADPGAVARKAKVIDKDDPSRFSVAVNEYVGAVRHLACRVLDLLGEGLGLRDPTSLSRLISAVDSDSLLRINHYPTSRSSAADISTKGIGFGEHTDPQILSLLRANDVDGLQVLLPDGHGGGDEQWVQVPADPSAFFINVGDLLQALTNGRLVSIRHRVMASTTRPRLSTIYFAAPPLDARVAALPETVTAGAPRRYRTFTWAEYKKAMYALRLSHNRLDLFHATSGSSRDVIDDDHEQ

SEQ ID NO: 79 - DNA, 1149 bp, Sorghum bicolor
atggcggcggcgggcgtggtcgtgttcgacgcggaggtgctgagccgggaggagcggatcccggcgcagttcgtgtggccggccgaggatcgggcgccgtcggcgggcggctgcggcgtggaggagatcgccatccccgtggtggacctcggcgagttcctccgccacggggatcgggagctgccgcgcggcgtggcggaggcgtgcgagcgccacggcttcttccaggtggtgaaccacggcgtccccgccgcgctgctcgccgacgcctaccgctgcctcgacgccttctacgcgcgcccgctcgccgacaagcagcgcgcgcagcggcgccccggggagtcccacggctacgccagcagcttcacgggccgcttccgctcctgcctgccctggaaggagacgctctccttcaactgccccgccggcaccggcggcgacacccagagcgccgccgccgtcgtcgactacttcgtcgacgtcctcggcgaggactaccgccacatgggagaggtgtaccaggagtactccgacgagatggcgcggctagcgatggacgtgacggaggtgctggcggcggcgctgggcctgcgccgcggcgcgctgcgcgggttcttcgacggcggcgactccatcatgcggctgaaccactacccggcgtgccggcagccgcaactgacgctggggacggggccgcaccgggacccgacgtcgctgacgctgctgcaccaggacgacgtgggcgggctgcaggtgtgcgccggcggcggcggtggtggtgagtggcgcgcggtgcggccccgcgcggacgcgttcgtggtcaacatcggcgacaccttcgccgcgctcaccgacgggcgccacgccagctgcctccaccgcgccgtggtcagcggtgaccgcgcccgcaggtcgctcgccttcttcttcaacccgccgctcgaccgcgtcgtccgcccgccggacgcgctcctcctcgaggacgagaagcgccgccgcccgcgcgcgttcccggacttcacgtggcgcgagttcctcgagttcacgcagaagcattaccggtcggacgcgagcaccatggacgccttcgtgtcgtggatcgccggaggacgcggcgatggccatggcggcagacaggagggcaagtga

SEQ ID NO: 80 - protein, 382 aa, Sorghum bicolor
MAAAGVVVFDAEVLSREERIPAQFVWPAEDRAPSAGGCGVEEIAIPVVDLGEFLRHGDRELPRGVAEACERHGFFQVVNHGVPAALLADAYRCLDAFYARPLADKQRAQRRPGESHGYASSFTGRFRSCLPWKETLSFNCPAGTGGDTQSAAAVVDYFVDVLGEDYRHMGEVYQEYSDEMARLAMDVTEVLAAALGLRRGALRGFFDGGDSIMRLNHYPACRQPQLTLGTGPHRDPTSLTLLHQDDVGGLQVCAGGGGGGEWRAVRPRADAFVVNIGDTFAALTDGRHASCLHRAVVSGDRARRSLAFFFNPPLDRVVRPPDALLLEDEKRRRPRAFPDFTWREFLEFTQKHYRSDASTMDAFVSWIAGGRGDGHGGRQEGK

SEQ ID NO: 81 - DNA, 1113 bp, Sorghum bicolor
atggtggtcctcaccaagggcgagctggagcagatcacgctcccggccgtgcaacgcgcggcgccgccgctggccttcgtgccggaggtcgacctgtccgcggcggcggcgtccgtcgccgcccggtcggcggccgcgcgcgcggtggccaaggcgtgcgaggaccacgggttcttcaaggtgacgggccacggcgtgccggcgccgctcctggcgcgcctcgaggccgccgccgccgccttcttcgcgctcccgcagcgggacaaggacaaggccgcggccgccgctgttggcgggagcccgccgtttgggtacgccagcaagcggattggcggcaacggcgatctcggctgggttgagtacctcctgcttggcgtcacccccgccggcgccgccgctgcaccctcggcgttgtccgccgcgccagtgtcgtctgcgtccgagggcgccgcgccatcctgttgtttccgtgatgttctggacgagtacatcgcggcggtgcgacgcatgacgtgcacggtgctggagctgatggcgcaaggcctgggcctggacgacgacacggccgtgttcagcaggctggtgctggaccgggacagcgactccatgctgagggtgaaccactacccgccgcggcccgagaccgccgccgccgccggcgagccggcggaggtgaggcggccgcggctgacggggttcggcgagcacaccgacccgcagatcatctccgtgctccggtccaacgacacggccgggctggagatctcgctccgggatggctcctgggtctccgtcccctccgacacccaatccttcttcgtcaacgtcggcgacgcattgcaggtgctgacgaacgggcggttccggagcgtgcggcaccgggtgatggtgagcagcgggcggccgcgggtgtcggtcatcttcttcggcgggccgccgccgcgggagcgcctggcgccgctgccggggctggtggacagggagggcggccgccgacggtacagggagttcacgtggagggagtacaagacctcggcgtaccggaccaagctcgccgacaacaggctctgctacttcgagacgacgaccgccgccgccgccgcgaccagctag

SEQ ID NO: 82 - protein, 370 aa, Sorghum bicolor
MVVLTKGELEQITLPAVQRAAPPLAFVPEVDLSAAAASVAARSAAARAVAKACEDHGFFKVTGHGVPAPLLARLEAAAAAFFALPQRDKDKAAAAAVGGSPPFGYASKRIGGNGDLGWVEYLLLGVTPAGAAAAPSALSAAPVSSASEGAAPSCCFRDVLDEYIAAVRRMTCTVLELMAQGLGLDDDTAVFSRLVLDRDSDSMLRVNHYPPRPETAAAAGEPAEVRRPRLTGFGEHTDPQIISVLRSNDTAGLEISLRDGSWVSVPSDTQSFFVNVGDALQVLTNGRFRSVRHRVMVSSGRPRVSVIFFGGPPPRERLAPLPGLVDREGGRRRYREFTWREYKTSAYRTKLADNRLCYFETTTAAAAATS

SEQ ID NO: 83 - DNA, 738 bp, Sorghum bicolor
atgttgatgctttttcttcactgttgttgcagtaatgtggtgaacgagtatgtgggagcaatgaggcagcttgcatgtgagatcctggacctgttaggagaggggctagggctcaaggaccccagatccttcagcaagctcatcactgacacagacagcgactcactcctgaggatcaaccactaccctccagcatgcaccattcagaagcttgaccatgacaaccaatgcaagatgaagagcagtttcagaatcaagactggcaatggtgtgaaccagtcagcaggtgcacggatcggattcggggagcattcagacccgcagattcttagcttgctccgatcaaacgatgttgacggccttcaggtgcttctgaactgcgacggcagggaggtgtgggttcaggtgccatccgatccatcagcattctttgtcaatgttggtgatctcctccaggctttgacaaatgggaaggtgataagtgtccggcacagggtaattgcaaactcctgcagggcaaggctgtccacaatctacttcgctgcgccgccactgcatgcacgaattttggccctcccagagacaatcacagccaactcaccccgccagtaccggcccttcacctgggccgagtacaagaagacaatgtactccctccgcctgagccacagccgcctcaacctcttccacatcgaccatgatgaccacagcaatgtcggcaaaggagaacaagaatag

SEQ ID NO: 84 - protein, 245 aa, Sorghum bicolor
MLMLFLHCCCSNVVNEYVGAMRQLACEILDLLGEGLGLKDPRSFSKLITDTDSDSLLRINHYPPACTIQKLDHDNQCKMKSSFRIKTGNGVNQSAGARIGFGEHSDPQILSLLRSNDVDGLQVLLNCDGREVWVQVPSDPSAFFVNVGDLLQALTNGKVISVRHRVIANSCRARLSTIYFAAPPLHARILALPETITANSPRQYRPFTWAEYKKTMYSLRLSHSRLNLFHIDHDDHSNVGKGEQE

SEQ ID NO: 85 - DNA, 1113 bp, Sorghum bicolor
atgcgttacgtagctgccactccgaccatgccggccttgacgacgacgaccgcggagagcgccgccgaaccgcctctggcggacagctacctcgacctgctccgccgcggcggcattgcaacgccaccgcggaccgagggccgctgctgcgtgcaggagcgcgagctgccgttgatcgacctgtcgtgcctgcagcagaggagcggcggcggcggcggcagcgcgagggcggcgtgcgcggacgccatggcgcgggcggcctcggagtggggcttcttccaggtgaccgggcacggcgtgagccgggcgctgctggagcggctgcgggcggagcaggcgcggctgttccggctgccgttcgaaaccaaggccaaggccgggctgctcaacggctcctaccgctggggcgcccccacggcggccacgtcgctccgccacctctcgtggtccgaggcgttccacgtcccgctcgccagcatctccggtgctgcctgcgacttcggagacctcagctccctcaggggcgtgatgcaggaggtggcggacgcgatgtcgcgggtggccaagaccgtggcggtggcgctggcggggagcctgctgcagggcggcggccacgacgagcacgaggcggcggcggcgttcccggcgggctgcgacgagaccacctgctacctgcggctgaataggtacccggcgtgcccgttcgcggcggacaccttcgggctggtgccccacacggacagcgacttcctcacggtgctgtgccaggaccacgtcgggggcctgcagctcctcaaggacggccgctgggtcgccgtcaagccccgcccggacgcgctcatcgtcaacatcggcgatctgtttcaggcgtggagcaacaaccggtacaagagcgtggagcacaaggtggtggccaacgcgacggcggagcgcttctcggcggcctacttcctgtgcccgtcgtacgactcgcccgtcggcacgtgcggcgagccgtcgccgtatagggacttcaccttcggggagtacaggaggaaggtgcaggaggacgtcaagcggaccggccgaaagattgggctcccaaactttctcaagcagcaatcgcggcagtaa

SEQ ID NO: 86 - protein, 370 aa, Sorghum bicolor
MRYVAATPTMPALTTTTAESAAEPPLADSYLDLLRRGGIATPPRTEGRCCVQERELPLIDLSCLQQRSGGGGGSARAACADAMARAASEWGFFQVTGHGVSRALLERLRAEQARLFRLPFETKAKAGLLNGSYRWGAPTAATSLRHLSWSEAFHVPLASISGAACDFGDLSSLRGVMQEVADAMSRVAKTVAVALAGSLLQGGGHDEHEAAAAFPAGCDETTCYLRLNRYPACPFAADTFGLVPHTDSDFLTVLCQDHVGGLQLLKDGRWVAVKPRPDALIVNIGDLFQAWSNNRYKSVEHKVVANATAERFSAAYFLCPSYDSPVGTCGEPSPYRDFTFGEYRRKVQEDVKRTGRKIGLPNFLKQQSRQ

SEQ ID NO: 87 - DNA, 1149 bp, Sorghum bicolor
atgccggccttcgccgggagcgcagcggagccgccgctggcagacagctactacgcgctgctccgacgccgcggcggcggcggcaataatgatgatgaagaagcatcaggtggcgcctactactacgacacgacgtcgtcgacagtgccatcgtcggacgacgacgtggcggagtgcgagctcccgatgatcgacgtcgggtgcctgacgaccctgacgaggagcgagcacggatcgtcgtcggaggcggagcgggcggcgtgcacggccgccatcgcgcgcgccgccgaggagtggggcttcttccaggtgcgcaaccacggcgtgtcgcaggagctcctggacgagatgcggcgggagcaggcgcgcctgttccgcctgccgttcgaggccaaggccacggccggcctgctcaaccactcctaccgctggggcaccccgaccgcgacgtccccgcagcagctgtcctggtccgaggccttccacgtcccgctcgccggcgtctccggatccgccgccgccggcacctgcgacttcggcgacctcaccaccctcagggatgtgactcgggaggtggcgggcgcgatgtcaaagctggccggcacgctggcgcgcgtcctggcggaggaggcccggccccggccctgcctgcccgcgggcggcggcggcggtggcggtggcgagcgcttcccggaggggtgcgacgagacgacgtgcttcctgcggctgaaccggtacccgccgtgccccatcgccgccgacgccttcggcctggtcccgcacacggacagcgacttcctcaccgtgctctgccaggaccagcaggtcggcggcctgcagctcatgaaggggggcaggtgggtggccgtcaagccaatccccggcgccctcatcgtcaacatcggggacctcttccaggcgtggagcaacaacagatacaagagcgtggagcacaaagtgatgacgaacgccaagacggagcggtactccgttgcctactttctttgcccgtcctacgactcgccgatcggcacgtgcgaggagccttctctttacaggacgttcacgttcggagagtacaggcgaaaggtgcaagaagatgtcaagagaaccgggaagaaggtcggcctccctaattttctcgtgtaa

SEQ ID NO: 88 - protein, 382 aa, Sorghum bicolor
MPAFAGSAAEPPLADSYYALLRRRGGGGNNDDEEASGGAYYYDTTSSTVPSSDDDVAECELPMIDVGCLTTLTRSEHGSSSEAERAACTAAIARAAEEWGFFQVRNHGVSQELLDEMRREQARLFRLPFEAKATAGLLNHSYRWGTPTATSPQQLSWSEAFHVPLAGVSGSAAAGTCDFGDLTTLRDVTREVAGAMSKLAGTLARVLAEEARPRPCLPAGGGGGGGGERFPEGCDETTCFLRLNRYPPCPIAADAFGLVPHTDSDFLTVLCQDQQVGGLQLMKGGRWVAVKPIPGALIVNIGDLFQAWSNNRYKSVEHKVMTNAKTERYSVAYFLCPSYDSPIGTCEEPSLYRTFTFGEYRRKVQEDVKRTGKKVGLPNFLV

SEQ ID NO: 89 - DNA, 1077 bp, Sorghum bicolor
atggaggactacgactacgagccgccgttgatggccacgtacaggcatctcttggacagtcacccgcaccgactggacgtcgtcgatcatcggagcggcgccgacgacgacgaggagggcttcctcctcccggtgatcgacctttccagcctgctggagcagtcatcatcaggcgccgaggcagcagcagagcagtgccgggcgtccatcgtgcgcgccgcctcggagtggggcttcttccaggtgaccaaccacggcgtgccgcaggcgctgctggacgagctgcaccaggcgcaggtcgccgtcttccgccggcccttccacctcaaggcgagccagccgctgctggacttctcgccggagagctaccgctggggcacacccaccgcaacgtgcctcgaccaactctcgtggtccgaggcctaccacatccccacgaccaatacgacggcggcggctgacgacaagaccaggctcgtggtggaggaggtgtccacggcgatgtcgaagctggcgcagcggctggcagggatcctcgtcgcagacctgctgctgggcgacagtagcatcggcgacggcgaggacgacgacacggcagcggcggtggtgtcgcggtgcacgcggagcacctgcttcctaaggctgaaccggtacccgccgtgcccggcgcccagcggcgcctacgggctgtgcccgcacacggacagcgacttcctcaccatcctgcaccaggacggcgtcggcggcctccagctcgtcaaggccgggcggtgggtcgccgtcaagcccaaccccggcgcgctcatcgtcaacgtgggcgacctcctgcaggcgtggagcaacgaccggtaccggagcgtcgagcaccgggtcatggccagcgacgcgcgggagcggttctccgtcgccttcttcctctgccccagctacgacacgctcgtccggccacgctgcggcgccggcggacctcctcgctacgagagcttcaccttcggggagtaccggaaccagatcagggaggacgtcaggctcacgggccgaaagctcggcctgcaacgctttcgcaaaccagagtaa

SEQ ID NO: 90 - protein, 358 aa, Sorghum bicolor
MEDYDYEPPLMATYRHLLDSHPHRLDVVDHRSGADDDEEGFLLPVIDLSSLLEQSSSGAEAAAEQCRASIVRAASEWGFFQVTNHGVPQALLDELHQAQVAVFRRPFHLKASQPLLDFSPESYRWGTPTATCLDQLSWSEAYHIPTTNTTAAADDKTRLVVEEVSTAMSKLAQRLAGILVADLLLGDSSIGDGEDDDTAAAVVSRCTRSTCFLRLNRYPPCPAPSGAYGLCPHTDSDFLTILHQDGVGGLQLVKAGRWVAVKPNPGALIVNVGDLLQAWSNDRYRSVEHRVMASDARERFSVAFFLCPSYDTLVRPRCGAGGPPRYESFTFGEYRNQIREDVRLTGRKLGLQRFRKPE

SEQ ID NO: 91 - DNA, 1089 bp, Sorghum bicolor
atgccggccttcgccgggagcgcagcggagccgccgctggcagacagctactacgcgctgctccgacgccgcggcggcggcggcaataatgatgatgaagaagcatcaggtggcgcctactactacgacacgacgtcgtcgacagtgccatcgtcggacgacgacgtggcggagtgcgagctcccgatgatcgacgtcgggtgcctgacgaccctgacgaggagcgagcacggatcgtcgtcggaggcggagcgggcggcgtgcacggccgccatcgcgcgcgccgccgaggagtggggcttcttccaggtgcgcaaccacggcgtgtcgcaggagctcctggacgagatgcggcgggagcaggcgcgcctgttccgcctgccgttcgaggccaaggccacggccggcctgctcaaccactcctaccgctggggcaccccgaccgcgacgtccccgcagcagctgtcctggtccgaggccttccacgtcccgctcgccggcgtctccggatccgccgccgccggcacctgcgacttcggcgacctcaccaccctcagggatgtgactcgggaggtggcgggcgcgatgtcaaagctggccggcacgctggcgcgcgtcctggcggaggaggcccggccccggccctgcctgcccgcgggcggcggcggcggtggcggtggcgagcgcttcccggaggggtgcgacgagacgacgtgcttcctgcggctgaaccggtacccgccgtgccccatcgccgccgacgccttcggcctggtcccgcacacggacagcgacttcctcaccgtgctctgccaggaccagcaggtcggcggcctgcagctcatgaaggggggcaggtgggtggccgtcaagccaatccccggcgccctcatcgtcaacatcggggacctcttccaggtacagaatctagtatatgatatgaacatatatattccgattccaaacccttcaaaagtgggcttgctgttgctgtcgcgtcgtcggacacgcacagcggcgttcaaggccttgtttacttctaaaatttttttgcaaaatatgaatagtagcattttcgtttgtatttga

SEQ ID NO: 92 - protein, 362 aa, Sorghum bicolor
MPAFAGSAAEPPLADSYYALLRRRGGGGNNDDEEASGGAYYYDTTSSTVPSSDDDVAECELPMIDVGCLTTLTRSEHGSSSEAERAACTAAIARAAEEWGFFQVRNHGVSQELLDEMRREQARLFRLPFEAKATAGLLNHSYRWGTPTATSPQQLSWSEAFHVPLAGVSGSAAAGTCDFGDLTTLRDVTREVAGAMSKLAGTLARVLAEEARPRPCLPAGGGGGGGGERFPEGCDETTCFLRLNRYPPCPIAADAFGLVPHTDSDFLTVLCQDQQVGGLQLMKGGRWVAVKPIPGALIVNIGDLFQVQNLVYDMNIYIPIPNPSKVGLLLLSRRRTRTAAFKALFTSKIFLQNMNSSIFVCI

SEQ ID NO: 93 - DNA, 987 bp, Sorghum bicolor
atggcgctgggatcggagtcacaggcggcgacgaccgcggacccgtcgtgtccgccgttccctctcctggaggacgacggaggccacatccacgagcaggagcaggaggtcccaagtggagccgagctggagctcccgaccgtggacctggatgctccgggggaggcgctggcagcagcgtgccggggactcggcgtgttccgcctcgccaaccacggcgtccccgcgtcgctctccgcgcggctcttcgcgacggcgcgggccgcgctggccggggcgccgttccacgacaagcgcgcgcagccgggctacttctggggcacgccggcgctctcgctccgcgtccgggacgtcaactgggtcgagggcttccacgtcgccctggggggccaccagcagcccgcccccgggccgccgctcggcgacctacttgacctcgcggcggagtacggcgcgcacatggcgcgggtggcgcgggcgctcttcgacgcgctcgccgcgccgctgggcctcggcgcagaccaggcagcgacctacctcgcggagcgcgacgggttcctgcgggtgtaccgctacccgcgatgcccggagcccgggcacctcgggatggaggcccacacggacagctccgtgctctccgtcatcaaccaggacgccgtcggcggcctgcaggtgttccacgacggcgcgtggcgcgacgtcgcgccgggagccggcgagacgggcacgctgctggtcaacctgggcgacatggcgcgggccatcagcggcgacgcgtactgcagcgtgcgccacagggtggcggcgagccaggcggcggagaggctctcgctctgctacttcgcgttcccgcaggacgacgccgtcatcagctgcgctggcggcaggtacaggcccttcacctacgccgagttccgggagcaggtgcaggccgacatcaaggccactgggtccaaggtcggcctcgagcgcttccttcttcgctaa

SEQ ID NO: 94 - protein, 328 aa, Sorghum bicolor
MALGSESQAATTADPSCPPFPLLEDDGGHIHEQEQEVPSGAELELPTVDLDAPGEALAAACRGLGVFRLANHGVPASLSARLFATARAALAGAPFHDKRAQPGYFWGTPALSLRVRDVNWVEGFHVALGGHQQPAPGPPLGDLLDLAAEYGAHMARVARALFDALAAPLGLGADQAATYLAERDGFLRVYRYPRCPEPGHLGMEAHTDSSVLSVINQDAVGGLQVFHDGAWRDVAPGAGETGTLLVNLGDMARAISGDAYCSVRHRVAASQAAERLSLCYFAFPQDDAVISCAGGRYRPFTYAEFREQVQADIKATGSKVGLERFLLR

SEQ ID NO: 95 - DNA, 978 bp, Triticum aestivum
atggtggttcttgccagcacgcccgccgtcgatcacatcccgctcctcaggtcccccgaccccggggactacttctccggcatgccggttgtcgacctctccagccctggcgcgccgcgggccatcgccgacgcctgcgagcgcttcgggttcttcaagctcgtcaaccacggggtgccagcggacacgatggacaggctcgagtcagaggccgtcaggttcttctcgctgccgcaggccgacaaggaccgctccggcccggcctacccgttcggctacggcagcaagcgcatcgggctcaatggcgacatgggctggctcgagtacctcctcctcgccgtcgagtccgcgtcgctctccggcgcctgcaccgtcccgtcctgcgcgctcttggcggcgctgaacgagtacatcgcggcggtgcggaaggtggcggtgcgggtgatggaggcgatggcggaggggctgggcattgcgcccgttgacgcgctgagcgcgatggtgacggcgggggggagcgaccaggtgttccgggtgaaccactacccgccgtgccacgcgctgcaagggctgggctgcagcgccacaggcttcggcgagcacaccgacccgcagctcatctccgtgctgcgctccaacggcacgtccggcctgcagatcgcgctccagaacgggcagtgggtgtccgtgccctcggaccgcgacgccttcttcgtcaacgtcggcgactcgttgcaggtgctgaccaacgggaggttcaagagcgtgaagcacagggtggtggccaacagcctaaagtctagggtttccatgatctactttggagggccagcgatgacacagaggattgcaccattgccgcagctgctgggcgcgggagagcagagcctgtacaaggacttcacatggggcgagtacaagaaggctgcctacaactcgaggctcggggacaacaggctggctcagttccacaggtag

SEQ ID NO: 96 - protein, 325 aa, Triticum aestivum
MVVLASTPAVDHIPLLRSPDPGDYFSGMPVVDLSSPGAPRAIADACERFGFFKLVNHGVPADTMDRLESEAVRFFSLPQADKDRSGPAYPFGYGSKRIGLNGDMGWLEYLLLAVESASLSGACTVPSCALLAALNEYIAAVRKVAVRVMEAMAEGLGIAPVDALSAMVTAGGSDQVFRVNHYPPCHALQGLGCSATGFGEHTDPQLISVLRSNGTSGLQIALQNGQWVSVPSDRDAFFVNVGDSLQVLTNGRFKSVKHRVVANSLKSRVSMIYFGGPAMTQRIAPLPQLLGAGEQSLYKDFTWGEYKKAAYNSRLGDNRLAQFHR

SEQ ID NO: 97 - DNA, 1044 bp, Triticum aestivum
atgccggccttcgccgagagcacggccgagccacctctggcggacagctactacgcgctgctccgcggtggcaacaaagccgacgagtgcgcctcggcgccgccgcctggctgccaggccccgcccgtgtcggaatgcgagctcccgatgatcgacgttgggtgcctgacggcgtgcggcgggggcacggaggagagggcggcatgcgcggcggcgatcgcgtccgcggccgctgaatggggcttcttccaggtggtcaaccacggcgtcaagcaggagctcctggaggcgatgcggcgggagcaggtgcgcctcttccgcctgccgttcgaggccaaggccacggccggccttctcaacgactcctaccgctggggctcccctaccgccacgtcgccaaggcagctgtcctggtctgaggccttccatgtcccgcttgccggcatctccggcagcccttgcagctacggcgagctcaccagcatcagggatgtgacgcaggaggtggcgaacgcgatgtcaaagctggccaacacgctggcgcgcgtcctggcctcgagcctgggacacaccgccggccaacgcttcccggaagggtgcgacgagaggacgtgcttcctccggctgaacaggtacccgccgtgcccgttctcgccggacgccttcggcctggtgccgcacacggacagcgacttcctcaccgtgctctgccaggaccaagtcggcggcctgcagctgatgaagggctcccagtgggtggccgtcaagcccattcccggcgctctcatcgtcaacattggagacctcttccaggcatggagcaacaacagatacaagagcgtggagcacaaagtggtaaccaacgcgacgacggagaggtactccgtggcatatttcctttgcccgtcctacgactcgcccatcggcgcatgcgaggagccttcaccttacaggaccttcaccttcggggagtatcggagaagggtgcaggaagacgtcaagaagatggggaagaagattggccttcccaactttctgctgtag

SEQ ID NO: 98 - protein, 347 aa, Triticum aestivum
MPAFAESTAEPPLADSYYALLRGGNKADECASAPPPGCQAPPVSECELPMIDVGCLTACGGGTEERAACAAAIASAAAEWGFFQVVNHGVKQELLEAMRREQVRLFRLPFEAKATAGLLNDSYRWGSPTATSPRQLSWSEAFHVPLAGISGSPCSYGELTSIRDVTQEVANAMSKLANTLARVLASSLGHTAGQRFPEGCDERTCFLRLNRYPPCPFSPDAFGLVPHTDSDFLTVLCQDQVGGLQLMKGSQWVAVKPIPGALIVNIGDLFQAWSNNRYKSVEHKVVTNATTERYSVAYFLCPSYDSPIGACEEPSPYRTFTFGEYRRRVQEDVKKMGKKIGLPNFLL

SEQ ID NO: 99 - DNA, 1122 bp, Triticum aestivum
atggtggtgccttccacgacgccggcgcggcaagagacggcgaccatgctgcttccaccgccgtccgccggcggcggcgccataccgacggttgacatgtccgcgccccgcggccgcggcgcgctgtcgcggcaggtggcacgtgcgtgcgcggagcagggcttcttccgtgccgtcaaccacggcgtgcctccggcggggcccccggcacggctggacgccgccacctcggcgttcttcgcgctcgcggcacatgacaagcagcgcgccggcccgccgaacccgctcggctacggctgccgcagcatcggcttcaacggcgacgtgggcgagctcgagtacctcctcctccacgccaaccccgccgccgtcgcgcacagggccagctccatcgacaccaacgacccctcacgcttcagttctgttgtgaatgagtatgtggaagcagtgaagcagcttgcatgtgacatcctggacctgttgggagaggggctagggctggaggaccccaggctcttcagcaagctcatcacagaaactgacagtgactccctcttgaggatcaaccactaccctccatcatgcaccgttcacaagcttgaccatgatgaccaatgcaagctcaagggggttgccaggaccaaggctggtagcggtgggaatccagcggcgggtggccggatcgggttcggtgagcactccgacccacagctacttagcttgctccgagcaaacgacgttgatggcttgcaggtgcttctgccggacatcaacggcaaggacacgtggattcaggtgccagcagactcgtcggcctatttcatcaatgttggtgatctccttcaggctctgacaaatgggaggttagtaagcgtccggcacagagtaattgcaagtgcctgcaggccaaggctgtctaccatctactttgcagccccaccactgcatgcacgaatctcggcgctcccagagatggtcacagccggctcaccaccccggtaccggtcattcacctgggccgagtacaagacagcaatgtactcgctccgcctaagccacagccgcctggacctcttccatgttgatgatgacgaaagcggcaatggcagcaaaggaaaataa

SEQ ID NO: 100 - protein, 373 aa, Triticum aestivum
MVVPSTTPARQETATMLLPPPSAGGGAIPTVDMSAPRGRGALSRQVARACAEQGFFRAVNHGVPPAGPPARLDAATSAFFALAAHDKQRAGPPNPLGYGCRSIGFNGDVGELEYLLLHANPAAVAHRASSIDTNDPSRFSSVVNEYVEAVKQLACDILDLLGEGLGLEDPRLFSKLITETDSDSLLRINHYPPSCTVHKLDHDDQCKLKGVARTKAGSGGNPAAGGRIGFGEHSDPQLLSLLRANDVDGLQVLLPDINGKDTWIQVPADSSAYFINVGDLLQALTNGRLVSVRHRVIASACRPRLSTIYFAAPPLHARISALPEMVTAGSPPRYRSFTWAEYKTAMYSLRLSHSRLDLFHVDDDESGNGSKGK

SEQ ID NO: 101 - DNA, 1122 bp, Triticum aestivum
atggtggtgccttccacgacgccggcgcgacaagagacggtgaccacgctgcttccaccgccgtgccccggcggcggcgccataccgacggttgacatgtccgcgccccacggccgcggcgcgctgtcgcggcaggtggcgcgtgcgtgcgcggagcagggcttcttccgtgccgtcaaccatggcgtgcctccagcgggacccgcggcacggctggacgccgccacctcggcgttcttcgcgctcgcggcacacgacaagcagcgcgccggcccgccgagcccgctcggctacggctgccgcagcatcggcttcaacggcgacttcggcgagctcgagtacctcctcctccacgccaaccccgccgccgtcgcgcacagagccagctccatcgacaccaacgacccctcacgcttcagttctgttgtgaatgagtatgtggaagcagtgaagcagcttgcatgtgacatcctggacctgttgggagaggggctagggctggaggaccccaggctcttcagcaagctcatcacagaaactgacagtgactccctcctgaggatcaaccactaccctccatcatgcaccgttcacaagcttgaccatgatgaccaatgcaagctcaagggggttgccaggaccaaggctggtaacggtgggaatccggcggcgggtggccggatcgggttcggtgagcactccgacccacagctacttagcttgctccgagcaaacgacgttgatggcttgcaggtgcttctgccggacatcaacggcaaggatgtgtggattcaggtgccagcagactcttcggcctatttcgtcaatgttggtgatctccttcaggctctgacaaatgggaggttagtaagcgtccggcacagagtaattacaagtgcctgcaggccaaggctgtccaccatctactttgcagccccaccactgcatgcacgaatctcagcgctcccagagatggtcacagccggctcaccaccccggtaccggtcattcacatgggccgagtacaagacagcaatgtactcgctccgcctaagccacagccgcctggacctcttccatgttgatgatgacgaaagcggcaacggcagcaaaggaaaataa

SEQ ID NO: 102 - protein, 373 aa, Triticum aestivum
MVVPSTTPARQETVTTLLPPPCPGGGAIPTVDMSAPHGRGALSRQVARACAEQGFFRAVNHGVPPAGPAARLDAATSAFFALAAHDKQRAGPPSPLGYGCRSIGFNGDFGELEYLLLHANPAAVAHRASSIDTNDPSRFSSVVNEYVEAVKQLACDILDLLGEGLGLEDPRLFSKLITETDSDSLLRINHYPPSCTVHKLDHDDQCKLKGVARTKAGNGGNPAAGGRIGFGEHSDPQLLSLLRANDVDGLQVLLPDINGKDVWIQVPADSSAYFVNVGDLLQALTNGRLVSVRHRVITSACRPRLSTIYFAAPPLHARISALPEMVTAGSPPRYRSFTWAEYKTAMYSLRLSHSRLDLFHVDDDESGNGSKGK

SEQ ID NO: 103 - DNA, 1092 bp, Triticum aestivum
atgccggccttcgccgagccagccattgatccgcctctggcggacagctaccgcgcgctgctgcgcagcgaccagctccaccgcggcggcattgcgccggcgctgtcgccggcggtgctggagagcgtggccgtgctggagcgcgacctgccgatgatcgacttgaagcgcctgacgagcggcgacgcgtgggagaggaaggcgtgcgcggacgccatggcttgcgcggcgtcggagtggggcttcttccaggtgatcaaccacggcgtggggcgcgagctcctggaggagatgaggcgcgagcaggcgcggctgttccgcctgccgttcgacaccaaggagaaggccgggctcctcaacggctcgtaccggtggggcaacccgacggctacgtcgctccggcacctctcatggtcggaggccttccacgttccgctcgccagcatctcgcgggaggactgcgactacggaaagctcagctccttgaggggcgtgatgcaggaggtggcggacgcgatgtcgcatgtggcggacacggtggcggcggcgctggcggaggacctggggcacgatgcggggggcggcgagccggcgttcccggcggggtgcgacgggacgacgtgcttcctgcggctcaacaggtacccggcgtgcccgttcgcgccggacaccttcgggctggtgccgcacacggacagcgacttcctcaccatcctctgtcaggaccaggtcgggggcctgcagctcatgaaggactcccgctgggtcgccgtgaaaccccgccccgacgcgctcatcgtcaacatcggcgatctgtttcaggcgtggagcaacaacaggtacaagagcgtggagcacaaagtggtggctaaccccaaggcggagcgcctctccgtcgcctacttcctgtgcccgtcgtacgactcgccggtcagcacatgcggcgaaccgtcggcgtacaggccgtttaccttcggggagtaccggaggaaggtgcaggacgatgtcaagagaaccggcaaaaaaattgggctccccaactttctcaaacagtctcccgttgacggcatgaatcacaccctctgttcttaa

SEQ ID NO: 104 - protein, 363 aa, Triticum aestivum
MPAFAEPAIDPPLADSYRALLRSDQLHRGGIAPALSPAVLESVAVLERDLPMIDLKRLTSGDAWERKACADAMACAASEWGFFQVINHGVGRELLEEMRREQARLFRLPFDTKEKAGLLNGSYRWGNPTATSLRHLSWSEAFHVPLASISREDCDYGKLSSLRGVMQEVADAMSHVADTVAAALAEDLGHDAGGGEPAFPAGCDGTTCFLRLNRYPACPFAPDTFGLVPHTDSDFLTILCQDQVGGLQLMKDSRWVAVKPRPDALIVNIGDLFQAWSNNRYKSVEHKVVANPKAERLSVAYFLCPSYDSPVSTCGEPSAYRPFTFGEYRRKVQDDVKRTGKKIGLPNFLKQSPVDGMNHTLCS

SEQ ID NO: 105 - DNA, 1065 bp, Triticum aestivum
atgccggcctccggcgagggtggcaccacctccgacccccctctggttgacagctatcgcacgctgctccgcaaaggaggtggcgacggctttgtgccggcgctggcggccgagagcctggccgtgctggagtgcgacctgccgatgatcgacttggagcgcctgatgatgggcgacgctagggagaggggcgtgtgtatggacgccatggcgagcgcggcgtcggagtggggcttcttccaggtgatcaaccacggcgtggggcaggagctcctggaggagatgaggcgggagcaggcgcggctatttcaccagccgttcaatatcaaggagaaggccggactcctcaacgggtcgtaccggtgggggaccccgacggcgacgtcgctccggcagctctcgtggtcggaggccttccacgttccgctcgcaagcatctctggggaagacgactgcgggcatgcagagctcagctccctgaggggagtgatgcaggaggtggcggccgcgatgtcgcgggtggcggacacggtggccgggacgctggcgaagaacctcgggcacgagtcgacgttcccggcggcggcggggtgcgacgggacgacgtgcttcctgcggctgaacaggtacccggcgtgcccgttcgcggcggacacgctcggcatggtgccgcacacggacagcgacttcctcaccgtcctttgccaggaccaggttgggggcctggagatcatgaaggactcccactgggtcgctgtgaaaccccacgcccacgcgctcatggtcaacgtcggcgatttgttccaggcgtggagcaacaacagatacaagagcgtggagcacagggtggtggccaactccaaggcggagcgcttctccgtcgcctacttcatgtgcccgccgtgtgactcgcccgtcggcacatgcgccgagccgtcgccgtacaagccgtttaccttcggggagtacaggcgcaaggtgcaggaagatgtcacgcgaacggggaagaagattggtctgtccaactttctcaaaggttctacctttgacggcctggctgaatga

SEQ ID NO: 106 - protein, 354 aa, Triticum aestivum
MPASGEGGTTSDPPLVDSYRTLLRKGGGDGFVPALAAESLAVLECDLPMIDLERLMMGDARERGVCMDAMASAASEWGFFQVINHGVGQELLEEMRREQARLFHQPFNIKEKAGLLNGSYRWGTPTATSLRQLSWSEAFHVPLASISGEDDCGHAELSSLRGVMQEVAAAMSRVADTVAGTLAKNLGHESTFPAAAGCDGTTCFLRLNRYPACPFAADTLGMVPHTDSDFLTVLCQDQVGGLEIMKDSHWVAVKPHAHALMVNVGDLFQAWSNNRYKSVEHRVVANSKAERFSVAYFMCPPCDSPVGTCAEPSPYKPFTFGEYRRKVQEDVTRTGKKIGLSNFLKGSTFDGLAE

SEQ ID NO: 107 - DNA, 1074 bp, Triticum aestivum
atgctggccttcgccaagcgcacgagctgcacgaccaccgatccgcctctggcggatagctaccgtgcgctgctctgcagaggcaagctcgagggtggcggcgctgcgtcggcgcatgcggtggagagcctggccatgctggagcgtgacctgccaattatcgacttgaagcgcctggcgagccgcgacgcgagggagagcaaggcgtgcgcggaggccatggcgagagctgcgtcggagtggggcttcttccaggtggtcaaccacggcgtggggcgggagcttttagaggagatgaggcgggagcaggcgaggctgttccgcctgccgttcggtaccaaggacaaggccgggctcctcaacggctcgtaccggtggggcaacccgacggccacgtcgctcgggcagctctcgtggttcgagtccttccacgttccgctccccagcatctcccgggaagactgcgaccgcggaaagctcagcacgttgaggggagtgatgcaggaggtggcggacgcgatgtcgcaggtggcgggcacggtggccgggatgctggcggagaacctcgggcacgaggcaggcggcgagtcggcgttcccggcagggtgcgacgggacgacgtgcttcctgcggcttaacaggtacccggcgtgcccgtttgcggcggactccttcggcatggtgccgcacacggacagcgacttcctcaccatcctctgccaggaccaggtcggggggctacagctcatcaaggactcccgctgggtcgccgtgaagccccacgccgacgcgctcattgtcaacgtcggcgatctgtttcaggcgtggagcaacaacaggtacaagagcgtggagcataaggtggtggccaattccaaggcggagcgtttctccgtcgcctacttcctgtgcccgtcgtcggactcgtccgtcggaacatgcggcgagccgtcgccgtacaagccgtttacctttggagagtataggaggagtgtacaggatgatgtcaagagaaccgggaaaaagattggactccccaactttctcaaacgttctacggttcacggcctcgat

SEQ ID NO: 108 - protein, 358 aa, Triticum aestivum
MLAFAKRTSCTTTDPPLADSYRALLCRGKLEGGGAASAHAVESLAMLERDLPIIDLKRLASRDARESKACAEAMARAASEWGFFQVVNHGVGRELLEEMRREQARLFRLPFGTKDKAGLLNGSYRWGNPTATSLGQLSWFESFHVPLPSISREDCDRGKLSTLRGVMQEVADAMSQVAGTVAGMLAENLGHEAGGESAFPAGCDGTTCFLRLNRYPACPFAADSFGMVPHTDSDFLTILCQDQVGGLQLIKDSRWVAVKPHADALIVNVGDLFQAWSNNRYKSVEHKVVANSKAERFSVAYFLCPSSDSSVGTCGEPSPYKPFTFGEYRRSVQDDVKRTGKKIGLPNFLKRSTVHGLD

SEQ ID NO: 109 - DNA, 1056 bp, Triticum aestivum
atggtggttcttgccaagggcgagctggagcagatcgcgctcccggccgtgcacaagacggcgccgccgctggccgacgtgccggaggtcgaccttgccgtggcgggtcgcggctctgagggacgggcggccgccgcgcgcgctgtggcggcggcgtgcgaggagcacgggttcttcaaggtgacgggccacggcgtgccggcagagctcctggcgcgcgtcgagaacgccgctgccgccttcttcgcgctctcgcagcgggacaaggaggcggcgatgtcggccgcgacgccgggcagtccgttcggctacgcaagcaagcggataggcaacaacggcgacctcgggtgggtcgagtatctcctgctcggtgtcaccgcggcgaccggcgggccattgtccgtgcccgaaggggtggtgccgtcggcgtcgctctgctctttccgcgaccttctgaacgagtacacggaggtcgtgaggaggatgacctgccaggtgctagagctgatggcggagggcctgggcatggacgacagggacgcgttcacgaggctggtcctgcacaaggaaagcgactcgatgctgcgggtgaaccactacccgccgcgccccgagctgaagctcctgcagcagcacggcggtggcggcagggtcaccgggttcggcgagcacaccgacccccagatcatctccgtgctccgctccaacgccacctccggcctcgagatcgcgctgcgcgacggcgcctgggtctctgtgccgccggaccacacttccttcttcgtcaacgttggcgacgccttgcaggtagtactgacgaacgggaggttccggagcgtgaggcaccgggtgatggtgaacagcgcccggccgcgggtgtcggtgatcttcttcggcggcccgccgccgcgggagacgctggcgccgctgccgcagctcgtcggggaaggcgggcgcagccggtacagggagttcacatggcgggagtacaaggcctcggcgtaccggaccaagctggcggcgaacaggctctgccacttcgagaccaccagctag

SEQ ID NO: 110 - protein, 351 aa, Triticum aestivum
MVVLAKGELEQIALPAVHKTAPPLADVPEVDLAVAGRGSEGRAAAARAVAAACEEHGFFKVTGHGVPAELLARVENAAAAFFALSQRDKEAAMSAATPGSPFGYASKRIGNNGDLGWVEYLLLGVTAATGGPLSVPEGVVPSASLCSFRDLLNEYTEVVRRMTCQVLELMAEGLGMDDRDAFTRLVLHKESDSMLRVNHYPPRPELKLLQQHGGGGRVTGFGEHTDPQIISVLRSNATSGLEIALRDGAWVSVPPDHTSFFVNVGDALQVVLTNGRFRSVRHRVMVNSARPRVSVIFFGGPPPRETLAPLPQLVGEGGRSRYREFTWREYKASAYRTKLAANRLCHFETTS

SEQ ID NO: 111 - DNA, 1077 bp, Triticum aestivum
atgctggccttcgccgagggcacgagctgcacgaccaccgatccgcctctggcggacagctaccgcgcgctgctctgcagaggcgagctcgagggcgtcggcgctgcgtcggcgcatgcggtggagagcctggccatgctggagcgtgatctgccgatcatcgacttggagcgcctggcgagccgcgactcgagggagagcaaggcgtgcgcggacgccatggcgagagcggcgtcagagtggggcttcttccaggtggtcaaccacggcgtggggcgggacctcctggaggagatgaggcgggagcaggcgaagctattccgcctgccgttccgtaccaaagacaaagccgggctcctcaatggctcgtaccggtggggcaacccgacggccacgtcgctcgggcagctctcgtggtcggagtccttccacgttccgctccccagcatctcccgggaagactgcgactacggaaagctcaactccttgaggggagtgatgcaggtggtggcggacgcgatgtcgcgagtggcgtacacggtggccgggactcttgcggagaacctcgggcacgaggcagggggcggcgagccggtgttcccggcagggtgcgacgggacgacgtgcttcctgcggctgaacaggtacccggcgtgcccgttcgcggcggacttcttcggcatggtgccgcacacggacagcgacttcctcaccatcctctgccaggaccaggtcgggggcctacagctcatcaaggactcccactgggtcgccgtgaagccccgcgccgacgcgctcattgtcaacgtcggcgatctgtttcaggcgtggagcaacaacaggtacaagagcgtggagcacaaggtggtggccaactccaaggcggagcgcttctccatcgcctacttcatgtgcccgttgtcggactcgccagtcggcacatacggggagccctcgccgtacaagccgtttaccttcgaggagtataggaggagtgtgcgggatgatgtcgagagaaccgggaaaaagattggactccccaactttctcaaacgttcaaccgttcacggcctcgat

SEQ ID NO: 112 - protein, 359 aa, Triticum aestivum
MLAFAEGTSCTTTDPPLADSYRALLCRGELEGVGAASAHAVESLAMLERDLPIIDLERLASRDSRESKACADAMARAASEWGFFQVVNHGVGRDLLEEMRREQAKLFRLPFRTKDKAGLLNGSYRWGNPTATSLGQLSWSESFHVPLPSISREDCDYGKLNSLRGVMQVVADAMSRVAYTVAGTLAENLGHEAGGGEPVFPAGCDGTTCFLRLNRYPACPFAADFFGMVPHTDSDFLTILCQDQVGGLQLIKDSHWVAVKPRADALIVNVGDLFQAWSNNRYKSVEHKVVANSKAERFSIAYFMCPLSDSPVGTYGEPSPYKPFTFEEYRRSVRDDVERTGKKIGLPNFLKRSTVHGLD

SEQ ID NO: 113 - DNA, 1056 bp, Triticum aestivum
atggtggttcttgccaagggcgaactggagcagatcgcgctcccggccgtgcacaagacggcgccgccgctggccaacatgccggaggtcgaccttgccgtggcgggaagcggctctgatggacgggcggccgccggacgcgcggtggcggcggcgtgcgaggagcacgggttcttcaaggtgacgggccaccgcgtgccagcagagctcctggcgcgcgtggagaacgccgctgccgccttcttcgcgctctcgcagcgggacaaggaggcggcgatgtcggccgcgacgccgggcagtccgttcggctacgcaagcaagcggataggcaacaacggcgacctcgggtgggtcgagtatctcctgctcggtgtcaccgcctcgacgggcgggccattgtccgtgcccgaaggggtggtgccgtcagcgtcgctctgctctttccgcgaccttctgaacgagtacacggtggccgtgaggaggatgacctgccaggtgctggagctgatggcggagggcctgcgtatggaagacagggacgcgttcacgaggctggtcctgcacaaggaaagcgactcgatgctgcgggtgaaccactacccaccgcgccccgagctgaagctcctgcagcagcagcacggcggcggcggcagggtcactgggttcggcgagcacaccgacccccagatcatctcggtgctccgctccaacgccacctccggcctcgagatcgcgctgcgcgacggcgcctgggtctccgtgccgccggaccagacctccttcttcgtcaacgtcggcgacgccttgcaggtactgacgaacgggaggttccggagcgtgaggcaccgggtgatggtgaacagcgtccggccgcgggtgtcggtgatcttcttcggcggcccggcgccgcgggagacgctggcgccgctgcggcagctcgtcggggaaggcgggcgcagccggtacagggagttcacatggcgagagtacaaggcctcggcgtaccggaccaagctggcggcgaacaggctcggccacttcgagaccaccagctag

SEQ ID NO: 114 - protein, 351 aa, Triticum aestivum
MVVLAKGELEQIALPAVHKTAPPLANMPEVDLAVAGSGSDGRAAAGRAVAAACEEHGFFKVTGHRVPAELLARVENAAAAFFALSQRDKEAAMSAATPGSPFGYASKRIGNNGDLGWVEYLLLGVTASTGGPLSVPEGVVPSASLCSFRDLLNEYTVAVRRMTCQVLELMAEGLRMEDRDAFTRLVLHKESDSMLRVNHYPPRPELKLLQQQHGGGGRVTGFGEHTDPQIISVLRSNATSGLEIALRDGAWVSVPPDQTSFFVNVGDALQVLTNGRFRSVRHRVMVNSVRPRVSVIFFGGPAPRETLAPLRQLVGEGGRSRYREFTWREYKASAYRTKLAANRLGHFETTS

SEQ ID NO: 115 - DNA, 723 bp, Triticum aestivum
atgtgtgtggatgcaggcagttctgttgtgaatgagtatgtggaagcagtgaagcagcttgcatgtgacatcctggacctgttgggagaggggctagggctggaggaccccaggctcttcagcaagctcatcacagaaactgacagtgactccctcctgaggatcaaccactaccctccatcatgcaccgttcacaagcttgaccatgatgaccaatgcaagctcaagggggttgccaggaccaaggctggtagcggtgggaatccggcggcgggtggccggatcgggttcggtgagcactctgacccacagctacttagcttgctccgagcaaacgacgttgatggcttgcaggtgcttctgccggacatcaacggcaaggacacgtggattcaggtgccagcagactcgtcggcctatttcgtcaatgttggtgatctccttcaggctctgacaaatgggaggttagtaagcgtccggcacagagtaattgcaagtgcctgcaggccaaggctgtccaccatctactttgcagccccaccactgcatgcacgaatttcggcgctcccagagatggtcacagccgactcaccaccccggtaccggtcattcacctgggccgagtacaagacagcaatgtactcactccgcctaagccacagccgcctggagctcttccatgttgatgatgacgaaagcggcaatggcagcaaaggaaaataa

SEQ ID NO: 116 - protein, 240 aa, Triticum aestivum
MCVDAGSSVVNEYVEAVKQLACDILDLLGEGLGLEDPRLFSKLITETDSDSLLRINHYPPSCTVHKLDHDDQCKLKGVARTKAGSGGNPAAGGRIGFGEHSDPQLLSLLRANDVDGLQVLLPDINGKDTWIQVPADSSAYFVNVGDLLQALTNGRLVSVRHRVIASACRPRLSTIYFAAPPLHARISALPEMVTADSPPRYRSFTWAEYKTAMYSLRLSHSRLELFHVDDDESGNGSKGK

SEQ ID NO: 117 - DNA, 558 bp, Triticum aestivum
atggatgtgacgcaggaggtggcgaacgcgatgtcaaagctggccaacacgctggcgcgcgtcctggccgagagcctgggacacaccgccggccaacgcttcccgaaagggtgcgacgagaggacgtgcttcctccggctgaacaggtacccgccgtgcccgttctcgccggacgccttcggcctggtgccgcacacggacagcgacttcctcaccgtgctctgccaggaccaagtcggcggcctgcagctgatgaagggctcccggtgggtggccgtcaagcccattcccggcgctctcatcgtcaacattggagacctcttccaggcatggagcaacaacagatacaagagcgtggagcacaaagtggtgaccaacgcgacgacggagaggtactccgtggcatacttcctttgcccgtcgtacgactcgcccatcggcgcatgcgaagagccttcaccttacaggaccttcaccttcggggagtatcggagaagggtgcaggaagatgtcaagaagacggggaagaagattggccttcccaattttctgctgtag

SEQ ID NO: 118 - protein, 185 aa, Triticum aestivum
MDVTQEVANAMSKLANTLARVLAESLGHTAGQRFPKGCDERTCFLRLNRYPPCPFSPDAFGLVPHTDSDFLTVLCQDQVGGLQLMKGSRWVAVKPIPGALIVNIGDLFQAWSNNRYKSVEHKVVTNATTERYSVAYFLCPSYDSPIGACEEPSPYRTFTFGEYRRRVQEDVKKTGKKIGLPNFLL

SEQ ID NO: 119 - DNA, 597 bp, Triticum aestivum
atgcaggaggtggcggacgcgatgtcgcgcgtggcggacacggtggcggcggcgctggcggaggacctcgggcacgatgcgtggggcggcgagccggcgttcccggcggggtgcgacgggacgacgtgcttcctgcggctcaacaggtacccggcatgcccgttcgcgccggacacgttcgggctggtgccgcacacggacagcgacttcctcaccatcctctgccaggaccaggtcgggggcctgcagctcatgaaggactcccgctgggtcgccgtgaaaccccgccccgacgcgctcatcgtcaacatcggcgatctgtttcaggcgtggagcaacaacaggtacaagagcgtggagcacaaagtggtggccaacgccaaggcggagcgcctctccgtcgcctacttcctgtgcccgtcgtacgactcgctggtcggcacatgcggcgagccgtcgccgtacaggccgtttaccttcggggagtaccggaggaaggtgcaggacgatgtcaagagaaccggcaaaaaaattgggctccccaactttctcaaacagtctcccgttgacgccatgaatcacagcctctgtacttaa

SEQ ID NO: 120 - protein, 198 aa, Triticum aestivum
MQEVADAMSRVADTVAAALAEDLGHDAWGGEPAFPAGCDGTTCFLRLNRYPACPFAPDTFGLVPHTDSDFLTILCQDQVGGLQLMKDSRWVAVKPRPDALIVNIGDLFQAWSNNRYKSVEHKVVANAKAERLSVAYFLCPSYDSLVGTCGEPSPYRPFTFGEYRRKVQDDVKRTGKKIGLPNFLKQSPVDAMNHSLCT

SEQ ID NO: 121 - DNA, 579 bp, Triticum aestivum
atgacctgccaggcgctggagctgatggcggagggcctgggcatggacgacagggacgccttcaccaggctggtcctgcacaaggaaagcgactcgatgctgcgggtgaaccactacccgccgcgccccgagctgaagctcctgcagcagcagcagcaacacggcggcggcggcagggtcaccgggttcggcgagcacaccgaccctcagatcatctccgtgctccgctccaacgccacctctggcctcgagatcgcgctgcgcgacggcgcctgggtctccgtgccgccggaccagacctccttcttcgtcaacgtcggcgacgccttgcaggtgctgactaacgggaggttccggagcgtgaggcaccgggtgatggtgaacagcgtccggccgcgggtgtcggtgatcttcttcggcggcccgtcgccgcgggagacgctggcgccgctgccgcagctcgtcggggaaggcgggcgcagccggtacagggagttcacatggcgggagtacaaggcctcggcgtaccggaccaagctggcggcgaacaggctctgccacttcgagaccaccagctag

SEQ ID NO: 122 - protein, 192 aa, Triticum aestivum
MTCQALELMAEGLGMDDRDAFTRLVLHKESDSMLRVNHYPPRPELKLLQQQQQHGGGGRVTGFGEHTDPQIISVLRSNATSGLEIALRDGAWVSVPPDQTSFFVNVGDALQVLTNGRFRSVRHRVMVNSVRPRVSVIFFGGPSPRETLAPLPQLVGEGGRSRYREFTWREYKASAYRTKLAANRLCHFETTS

SEQ ID NO: 123 - DNA, 546 bp, Triticum aestivum
  misc_feature (448)..(448): n is a, c, g, or t
atgcaggaggtggcggacgcgatgtcgcaggtggcgggcacggtggccgggatgctggcggagaacctcgggcacgaggcaggcggcgagtcggcgttcccggcagggtgcgacgggacgacgtgcttcctgcggcttaacaggtacccggcgtgcccgtttgcggcggactccttcggcatggtgccgcacacggacagcgacttcctcaccatcctctgccaggaccaggtcggggggctacagctcatcaaggactcccgctgggtcgccgtgaagccccacgccgacgcgctcattgtcaacgtcggcgatctgtttcaggcgtggagcaacaacaggtacaagagcgtggagcataaggtggtggccaattccaaggcggagcgtttctccgtcgcctacttcctgtgcccgtcgtcggactcgtccgtcggaacatgcggcngagagtataggaggagtgtacaggatgatgtcaagagaaccgggaaaaagattggactccccaactttctcaaacgttctacggttcacggcctcgat

SEQ ID NO: 124 - protein, 182 aa, Triticum aestivum
  VARIANT (150)..(150): Xaa can be any naturally occurring amino acid
MQEVADAMSQVAGTVAGMLAENLGHEAGGESAFPAGCDGTTCFLRLNRYPACPFAADSFGMVPHTDSDFLTILCQDQVGGLQLIKDSRWVAVKPHADALIVNVGDLFQAWSNNRYKSVEHKVVANSKAERFSVAYFLCPSSDSSVGTCGXEYRRSVQDDVKRTGKKIGLPNFLKRSTVHGLD

SEQ ID NO: 125 - DNA, 1101 bp, Zea mays
atggtggtgccttccacgacgccggtggtgcgccaagaaacgccaccgccgtcccacgacggcataggcataccgacggtggacctgtcggcgccgggcggccgcggcgcgctgtcgcggcaggtggcgcgcgcgtgcgcgcagcacggcttcttccgggccgtgaaccacggcgtggcgccaggccccgccgcacggctggacgccgccgccaggacgttcttcgcgctggcgccgcacaacaagcagcgcgccggcccgcccagcccactcggatacggctgccgcagcatcggcttcaacggcgacgccggggagctcgagtacctgctgctccacgccaacccggccgccgtcgcgcacagggccagatccatcgacactgatgacccctcgcgcttcagcaatgtggtgaacgagtatgtgggagcgatgaggcagctcgcatgtgagatcctggacctgctcggagaggggctagggctcaaggaccccagatccttcagcaggctcatcgctgacacagacagcgactcactcctgcggataaaccactaccctccaccatgcgccattcacaagcttgaccacgacagtcagtgcaggatgaagaacagtttcaggatcgtggcaggcaatggcgcgaaccagtcggcaggtgcacggatcggattcggggagcactcagacccgcagatccttagcttgctccgatcaaacgatgttgacggccttcaggtgcttctgaacagcgacggcagagaggtgtgggttcaggtgccagccgatccatcagcgttctttgtcaatgttggtgatctcctccaggccttcacaaatgggaaggtgataagcgtccggcacagggtaattgcaagctcgagcagggcgaggctgtcaacgatctacttcgctgcgccgccactgcatgcacgaattttggccctcccagagacagtcacagccaactcacccaggcagtaccggcccttcacctgggccgagtacaagaagacaatgtactccctccgcctcagccacagccgcctcaacctcttccacatcggccatgatgaccacggcaaaggagaacaagaatag

SEQ ID NO: 126 - protein, 366 aa, Zea mays
MVVPSTTPVVRQETPPPSHDGIGIPTVDLSAPGGRGALSRQVARACAQHGFFRAVNHGVAPGPAARLDAAARTFFALAPHNKQRAGPPSPLGYGCRSIGFNGDAGELEYLLLHANPAAVAHRARSIDTDDPSRFSNVVNEYVGAMRQLACEILDLLGEGLGLKDPRSFSRLIADTDSDSLLRINHYPPPCAIHKLDHDSQCRMKNSFRIVAGNGANQSAGARIGFGEHSDPQILSLLRSNDVDGLQVLLNSDGREVWVQVPADPSAFFVNVGDLLQAFTNGKVISVRHRVIASSSRARLSTIYFAAPPLHARILALPETVTANSPRQYRPFTWAEYKKTMYSLRLSHSRLNLFHIGHDDHGKGEQE

SEQ ID NO: 127 - DNA, 1053 bp, Zea mays
atgcgttacgtagctgccactccgaccatgccgtcccttgccgcggagagcgccgccgaaccgcctctggtggacagctacctggagctgctccggcgcggcggcggcggcattgcggcggcgaccgagtgctgcgtgcaggagcgcgagctgcccttgatcgacctgacgtgcctgggcagcgcggacgccatggcgagggcggcctcggagtggggctttttccaggtgaccgggcacggcgtgagccgggcgctgttggagcggctgcgggcggagcaggcgcggctgttccggctgccgttcgaaaccaaggccaaggccgggcttctcaacggctcctaccgctggggcgcccccacggccacgtcgctccgccacctctcgtggtcggaggcgttccacgtcccgctcgccagcatctccggcactgcctgcgacttcggagagctcagctccttgaggggcgtgatgcaggaggtggcggacgcgatgtcgcgggtggccaagaccgtggcggtggcgctggcggggagcctgctgggccacgacgaggcggcggcgttcccggcggggtgcggcgagaccacctgctacctgcggctgaatcggtacccggcgtgcccgttcgcggcgaacaccttcgggctggtgccccacacggacagcgacttcctgacggtgctgtcccaggaccaggtcgggggcctgcagctcatgacggacgccggctgggtggccgtcaagccacgccccgacgcgctcatcgtcaacatcggcgatctgtttcaggcctggagcaacaacctgtacaagagcgtggagcacaaggtggtggccaacgccacggcggagcgcttctcggcggcctacttcctgtgcccgtcctacgactcgctcgtcggcacgtgcggcgagccgtcgccgtacagagacttcaccttcggggagtacaggaggaaggtgcaggaggacgtcaagaggaccggaagaaagattgggctccccaactttctcaaacaccgcccaccccctcaatcacggcccgcctaa

SEQ ID NO: 128 - protein, 350 aa, Zea mays
MRYVAATPTMPSLAAESAAEPPLVDSYLELLRRGGGGIAAATECCVQERELPLIDLTCLGSADAMARAASEWGFFQVTGHGVSRALLERLRAEQARLFRLPFETKAKAGLLNGSYRWGAPTATSLRHLSWSEAFHVPLASISGTACDFGELSSLRGVMQEVADAMSRVAKTVAVALAGSLLGHDEAAAFPAGCGETTCYLRLNRYPACPFAANTFGLVPHTDSDFLTVLSQDQVGGLQLMTDAGWVAVKPRPDALIVNIGDLFQAWSNNLYKSVEHKVVANATAERFSAAYFLCPSYDSLVGTCGEPSPYRDFTFGEYRRKVQEDVKRTGRKIGLPNFLKHRPPPQSRPA

SEQ ID NO: 129 - DNA, 996 bp, Zea mays; identical to SEQ ID NO: 5

SEQ ID NO: 130 - protein, 331 aa, Zea mays; identical to SEQ ID NO: 6

SEQ ID NO: 131 - DNA, 1095 bp, Zea mays
atgccggccttcgcggggggcgcagcggagccgccgctggcagacagctactacgcgctcctccgccgcggcaatgacgatgaaggcgcctacacgacgtcgacagcgccatgggacgacgacgacgacgtctcactgcccgtggcggagtgcgagctcccgatgatcgacgtcgggtgcctgacgagcgccgaccacggaagctccccggaggcggaggcggagcgggcggcgtgcgcggccgccatcgcgcgcgccgccgaggagtggggcttcttccaggtgcgcaaccacggcgtgccgcaggagctcctggaggagatgcgccgggagcaggcgcggctgttccgcctgccgttcgagaccaaggccacggccggcctgctcaacgactcctaccgctggggcaccccgaccgcgacgtctccgcgccagctgtcctggtccgaggccttccacgtcccgctcgccggcgtctccggctccggcaccacctgcgacttcggcgacctcaccaccctcagggatgtgactcgggaggtggcgggcgcgatgtcaaagctggccggcacgctggcgcgcgtcctggcggaggccctcctgggtcggcggcccgccggcgagcgcttcccggaggggtgcgacgagacgacgtgcttcctgcggctgaaccggtacccggcgtgccccatctcccccggcgccttgggcctggtcccgcacacggacagcgacttcctcaccgtgctctgccaggaccagcaggtcggcggcctgcagctcatgaaggggggcaggtgggtggccgtcaagccaatccccggcaccctcgtcgtcaacatcggggacctcttccaggcgtggagcaacaacatatacaggagcgtggagcacaaggtgatgacgaacgccaggacggagcgctactccgtcgcctactttctctgcccgtcctacgactcgccgatcggcacgtgcgaggagccttctctctacaggacgttcaccttcggggagtacaggagaagggtgcaggaggacgtcaagaggaccgggaagaaggtcggcctccctaattttctcgtgcaaacataa

SEQ ID NO: 132 - protein, 364 aa, Zea mays
MPAFAGGAAEPPLADSYYALLRRGNDDEGAYTTSTAPWDDDDDVSLPVAECELPMIDVGCLTSADHGSSPEAEAERAACAAAIARAAEEWGFFQVRNHGVPQELLEEMRREQARLFRLPFETKATAGLLNDSYRWGTPTATSPRQLSWSEAFHVPLAGVSGSGTTCDFGDLTTLRDVTREVAGAMSKLAGTLARVLAEALLGRRPAGERFPEGCDETTCFLRLNRYPACPISPGALGLVPHTDSDFLTVLCQDQQVGGLQLMKGGRWVAVKPIPGTLVVNIGDLFQAWSNNIYRSVEHKVMTNARTERYSVAYFLCPSYDSPIGTCEEPSLYRTFTFGEYRRRVQEDVKRTGKKVGLPNFLVQT

SEQ ID NO: 133 - DNA, 1098 bp, Zea mays
atgccggccttcgcggggggcgcagcggagccgccgctggcagacagctactacgcgctcctccgccgcggcaatgacgatgaaggcgcctacacgacgtcgacagcgccatgggacgacgacgacgacgtctcactgcccgtggcggagtgcgagctcccgatgatcgacgtcgggtgcctgacgagcgccgaccacggaagctccccggaggcggaggcggagcgggcggcgtgcgcggccgccatcgcgcgcgccgccgaggagtggggcttcttccaggtgcgcaaccacggcgtgccgcaggagctcctggaggagatgcgccgggagcaggcgcggctgttccgcctgccgttcgagaccaaggccacggccggcctgctcaacgactcctaccgctggggcaccccgaccgcgacgtctccgcgccagctgtcctggtccgaggccttccacgtcccgctcgccggcgtctccggctccggcaccacctgcgacttcggcgacctcaccaccctcagcagggatgtgactcgggaggtggcgggcgcgatgtcaaagctggccggcacgctggcgcgcgtcctggcggaggccctcctgggtcggcggcccgccggcgagcgcttcccggaggggtgcgacgagacgacgtgcttcctgcggctgaaccggtacccggcgtgccccatctcccccggcgccttgggcctggtcccgcacacggacagcgacttcctcaccgtgctctgccaggaccagcaggtcggcggcctgcagctcatgaaggggggcaggtgggtggccgtcaagccaatccccggcaccctcgtcgtcaacatcggggacctcttccaggcgtggagcaacaacatatacaggagcgtggagcacaaggtgatgacgaacgccaggacggagcgctactccgtcgcctactttctctgcccgtcctacgactcgccgatcggcacgtgcgaggagccttctctctacaggacgttcaccttcggggagtacaggagaagggtgcaggaggacgtcaagaggaccgggaagaaggtcggcctccctaattttctcgtgcaaacataa

SEQ ID NO: 134 - protein, 365 aa, Zea mays
MPAFAGGAAEPPLADSYYALLRRGNDDEGAYTTSTAPWDDDDDVSLPVAECELPMIDVGCLTSADHGSSPEAEAERAACAAAIARAAEEWGFFQVRNHGVPQELLEEMRREQARLFRLPFETKATAGLLNDSYRWGTPTATSPRQLSWSEAFHVPLAGVSGSGTTCDFGDLTTLSRDVTREVAGAMSKLAGTLARVLAEALLGRRPAGERFPEGCDETTCFLRLNRYPACPISPGALGLVPHTDSDFLTVLCQDQQVGGLQLMKGGRWVAVKPIPGTLVVNIGDLFQAWSNNIYRSVEHKVMTNARTERYSVAYFLCPSYDSPIGTCEEPSLYRTFTFGEYRRRVQEDVKRTGKKVGLPNFLVQT

SEQ ID NO: 135 - DNA, 1050 bp, Zea mays
atggtagcgccgtcggcggcggcaggccgggacatggcgccggagtctctcccgctcggcattatcccgacggtggacatgtcggcgccgtcggggcgcggcgagctggcgcgccggctggtgcgcgcctgcgcggagcgcggcttcttcaaggccgtcaaccacggcgtgccgccgcgggtgtccgcccggctggacgccgccacgtcggcgttcttcgcgcgccccgctccggtgaagcaggcggccgggccgccggacccgctggggtatggcagccggaacattggtgccaacggcgacgtcggcgagctggagtacctcatcctgcacgcccaacccgcagcagtggcgcgcaaggccatggtcatcgacgcggaggacccttcgcggttcagtgtagcagtgaacgagtacgtggacgcagtgcggcgtctcgcgtgccgggtcctggacctcctcggcgagggcctcggcctcggggacccgacgtccttgagccgcttcgtctcggccgtcgtcgacagcgactccgtcctcaggatcaaccactaccccacgtccagcgcggcggcggatgtgtctgccaagggcatcgggttcggcgagcacaccgacccgcagatcctcagcctgctccgcgccaacgacgtggacggcctgcaggtgctgctgcccgacgcccgcggcggcagcggcggcgaccagtgggtccaggtgccggctgacccgtccgccttcttcatcaacgtcggtgacgcccttcaggccctgacaaacgggcggttggtgagcatccggcacagggtgatggccagcaccacccggccgcggctgtccaccatctacttcgccgcgccgccgctcgacgcccgcatcgcagcgctcccggagacggtggttgccggcgcggcgcggcggtacaggaccttcacatgggcggagtacaagaaggccatgtacgcgctccgcctcagccacaaccgtcttgatctcttccacgcagacgcatcctccggcggcagcggcgataaaaagcatgatatatag

SEQ ID NO: 136 - protein, 349 aa, Zea mays
MVAPSAAAGRDMAPESLPLGIIPTVDMSAPSGRGELARRLVRACAERGFFKAVNHGVPPRVSARLDAATSAFFARPAPVKQAAGPPDPLGYGSRNIGANGDVGELEYLILHAQPAAVARKAMVIDAEDPSRFSVAVNEYVDAVRRLACRVLDLLGEGLGLGDPTSLSRFVSAVVDSDSVLRINHYPTSSAAADVSAKGIGFGEHTDPQILSLLRANDVDGLQVLLPDARGGSGGDQWVQVPADPSAFFINVGDALQALTNGRLVSIRHRVMASTTRPRLSTIYFAAPPLDARIAALPETVVAGAARRYRTFTWAEYKKAMYALRLSHNRLDLFHADASSGGSGDKKHDI

SEQ ID NO: 137 - DNA, 1122 bp, Zea mays; identical to SEQ ID NO: 15

SEQ ID NO: 138 - protein, 373 aa, Zea mays; identical to SEQ ID NO: 16

SEQ ID NO: 139 - DNA, 1011 bp, Zea mays
atggtggtcctcgccaagggtgagctcgagcagatcgccctcccggctgcagagccgcccccggccgacgtgcggtcggtggacctgtccgccccggcgggccccgcgcgcgaggccgcggcgcgcgcgctggtggcggcgtgcgaggagcacgggttcttccgggtgacgggccacggcgtgccggccagactcgtgcgcgccgcggaggccgcggcggccgggttcttcgcgcggccgcagggcgagaaggaggaggagggccccacgctcgggtacggaagcaagcgcatcggcggcaacggcgacctcggctgggtcgagtacctcctgctcggtggcacacccgccgccgcgccttcctcggcattattgccctgcgccgccgccccgtcgccgtccgcgccggccgggccgttacgggaccttctggacgagtacacggtggcggtgcggcggatggcgtgcgcggtgctggagctgatggcggaggggctgggcatcgccggcggcgccggggacgcggtgctggcgcggctggtggcgcgcgcggacagcgactgcatgctgcgggtgaaccactacccgccgcggccggcgctcaaccccagcctcacggggttcggcgagcacaccgacccgcagatcatctcggtgctccgcgccaacggcacctccggcctggagatcgcgctgcgggacggcgcctgggcctccgtcccgcccgacggggacgccttcttcgtcaacgtcggcgacaccctgcaggtgttgacgaacgggaggttcaggagcgtgaggcacagggtggtggtgaacagcgagaagtcccgggtgtccatggtcttcttcggcggcccgccgcccggcgagaggctgggcccgctgccgcagctcctgggcgacggcggccggagccggtaccgggacttcacctggagcgagttcaagaccagcgggtgcaggaccaggctcgcggaagaccgcctgtcccgcttcgagaagaagtag

SEQ ID NO: 140 - protein, 336 aa, Zea mays
MVVLAKGELEQIALPAAEPPPADVRSVDLSAPAGPAREAAARALVAACEEHGFFRVTGHGVPARLVRAAEAAAAGFFARPQGEKEEEGPTLGYGSKRIGGNGDLGWVEYLLLGGTPAAAPSSALLPCAAAPSPSAPAGPLRDLLDEYTVAVRRMACAVLELMAEGLGIAGGAGDAVLARLVARADSDCMLRVNHYPPRPALNPSLTGFGEHTDPQIISVLRANGTSGLEIALRDGAWASVPPDGDAFFVNVGDTLQVLTNGRFRSVRHRVVVNSEKSRVSMVFFGGPPPGERLGPLPQLLGDGGRSRYRDFTWSEFKTSGCRTRLAEDRLSRFEKK

SEQ ID NO: 141 - DNA, 1116 bp, Zea mays; identical to SEQ ID NO: 21

SEQ ID NO: 142 - protein, 371 aa, Zea mays; identical to SEQ ID NO: 22

SEQ ID NO: 143 - DNA, 1188 bp, Zea mays
atgagatctgatggatggcgatatctaacaaatgaagaaaaagctggaagcctagcttcgccgccgtccacgtcgtctcgtcttccttttggaacaaggtcttcgtcgatgcaacaatcctcggccgcctcgatggcaatggaggaagacgacgactacgagccgccgttgatggccacgtacaagcatctgttggacagtcacccgcaccgacaactgggcgccggcgccgcgcaagacgacgaggattgcttcctcctcccggtgatcgacctttccagcctcctgccgccggtgcatcatcgcaagcagtcagcagctgcagagcagtgccgggcgtccatcgtgcgcgccgcctccgagtggggcttcttccaggtgaccaaccacggcgtgccgcaggttctgctggacgagctgcaccaggcgcaggccggcgtcttccgccggcccttccaactcaaggcgcaccagccgctgctggacttctcgccggagagctaccgctggggcacgcccaccgccacgtgcctggagcagctctcgtggtccgaggcctaccacatccccacaacgacgaccacgaccggtaacgacgacaagacccggctagtggtcgaggaggtgtcgacggcgatgtcgaagctggcgcagcggctggcggggatcctcgtcgcggagctgggcgaagacagcgcggcggcggtggtgtcgcggtgcacgcggagcacctgcttcctgcggctgaaccggtacccgccgtgcgcggcggcggccagcggcgtcgtctacgggctgtgcccacactcggacagcgacttcctgaccatactccaccaggacggcgtcggcggcctccagctcgtcaaggacgggcagtgggtagccgtgaagcccagccccggcgcgctcatcgtcaatgtgggcgacctcctgcaggcgtggagcaacgaccggtaccggagcgtcgagcaccgggtgatggccagcgccacgagggagcggttctccgccgccttcttcctgtgccccagctacgacacgctcatccggccgcgctgcggcgccggcggacctcctcctcgctatgagagcttcaccttcggggagtaccggaaccagatcagggaggacgtcaggctcacgggccgaaagctcggcctgcaacgcttccgcaaagcagagtag

SEQ ID NO: 144 - protein, 395 aa, Zea mays
MRSDGWRYLTNEEKAGSLASPPSTSSRLPFGTRSSSMQQSSAASMAMEEDDDYEPPLMATYKHLLDSHPHRQLGAGAAQDDEDCFLLPVIDLSSLLPPVHHRKQSAAAEQCRASIVRAASEWGFFQVTNHGVPQVLLDELHQAQAGVFRRPFQLKAHQPLLDFSPESYRWGTPTATCLEQLSWSEAYHIPTTTTTTGNDDKTRLVVEEVSTAMSKLAQRLAGILVAELGEDSAAAVVSRCTRSTCFLRLNRYPPCAAAASGVVYGLCPHSDSDFLTILHQDGVGGLQLVKDGQWVAVKPSPGALIVNVGDLLQAWSNDRYRSVEHRVMASATRERFSAAFFLCPSYDTLIRPRCGAGGPPPRYESFTFGEYRNQIREDVRLTGRKLGLQRFRKAE

SEQ ID NO: 145 - DNA, 996 bp, Zea mays; identical to SEQ ID NO: 25

SEQ ID NO: 146 - protein, 331 aa, Zea mays; identical to SEQ ID NO: 26

SEQ ID NO: 147 - DNA, 981 bp, Glycine max
atggtgttgctgtccaaagcaacaacagaacaatactcctacatcaagaactacatgccaactgcattctcctcaacaattcccatagtggacctctccaaacccgatgcaaagaccctcatagtgaaggcttgtgaggagtttggattcttcaaagtcatcaaccatggtgttcccattgaagctatatcccaattggaatccgaagccttcaagttcttctctatgccactcaatgagaaggaaaaagcagggcctcccaaaccatttgggtatggtagcaagaaaattggacacaatggggatgttggttgggttgagtaccttcttctcaacaccaatcaagaacacaacttctctttttatggcaaaaatgctgaaaaatttaggtgtctattaaacagttacatgtcttctgtgagaaaaatggcatgcgagattcttgagttgatggcagaaggattgaagattcagcaaaagaatgtgtttagcaagcttctgatggataaacagagtgactctgttttcagggtgaatcactaccctgcttgtcctgaacttgccgtgaatggtcagaacttgattgggttcggagaacatacagacccacaaatcatttctttacttaggtccaacaacacttcaggccttcagatttttcttagagatggaaactggatttcagtcccacctgatcacaaatctttcttcataaatgttggtgattctcttcaggttatgaccaatggaagatttcggagtgtgagacatagagttttggcaaatggatttaagtctaggctctcaatgatttactttggaggtccacctttgagtgaaaaaatagcgccattaccttctctcatgaaaggaaaagaaagcttatataaagaatttacgtggtttgagtacaagaattcaacctatggttcaagattggctgataataggcttggacattttgagagaattgttgcttga

SEQ ID NO: 148 - protein, 326 aa, Glycine max
MVLLSKATTEQYSYIKNYMPTAFSSTIPIVDLSKPDAKTLIVKACEEFGFFKVINHGVPIEAISQLESEAFKFFSMPLNEKEKAGPPKPFGYGSKKIGHNGDVGWVEYLLLNTNQEHNFSFYGKNAEKFRCLLNSYMSSVRKMACEILELMAEGLKIQQKNVFSKLLMDKQSDSVFRVNHYPACPELAVNGQNLIGFGEHTDPQIISLLRSNNTSGLQIFLRDGNWISVPPDHKSFFINVGDSLQVMTNGRFRSVRHRVLANGFKSRLSMIYFGGPPLSEKIAPLPSLMKGKESLYKEFTWFEYKNSTYGSRLADNRLGHFERIVA

SEQ ID NO: 149 - DNA, 981 bp, Glycine max
atggtgttgctgtccaaggcaacaacagaacaatactcctacatcaagaactacatgccaacggcattctcctcaacaattcccgtagtggacctctccaaaccagatgcaaagaccctcatagtgaaggcttgtgaggaatttggattcttcaaagtcatcaaccatggtgttcccatggaaactatatcccaattggaatctgaagccttcaagttcttctctatgccactcaatgagaaggaaaaagtaggccctcccaaaccatatgggtatggtagcaagaaaattggacacaatggggatgttggttgggttgagtaccttcttctcaacaccaatcaagaacacaacttctctgtttatggcaaaaacgctgagaaatttaggtgtttgttgaacagttacatgtcttctgtgaggaaaatggcatgtgagattcttgagctgatggcagaaggattgaagatacaacaaaaaaatgtgtttagcaagcttcttatggataaagagagtgactctgtttttagggtgaatcactaccctgcttgccctgaacttgtgaatggtcaaaacatgatagggtttggagaacacacggacccacaaatcatttctctacttaggtccaacaatacttcaggccttcagatttttcttagagatggaaactggatttcagtcccacctgatcacaaatctttcttcataaatgttggtgattctcttcaggttatgaccaatggaaggtttcgaagtgtgaaacacagagttttgacaaatggatttaagtctagactctcaatgatttactttggaggtccaccattgagtgagaaaatagtaccattatcttcacttatgaaaggaaaagaaagcttatacaaagagtttacgtggttcgagtataaaaatttaacctatgcttcaagattggctgataataggcttggacattttgagagaattgttgcttcataa

SEQ ID NO: 150 - protein, 326 aa, Glycine max
MVLLSKATTEQYSYIKNYMPTAFSSTIPVVDLSKPDAKTLIVKACEEFGFFKVINHGVPMETISQLESEAFKFFSMPLNEKEKVGPPKPYGYGSKKIGHNGDVGWVEYLLLNTNQEHNFSVYGKNAEKFRCLLNSYMSSVRKMACEILELMAEGLKIQQKNVFSKLLMDKESDSVFRVNHYPACPELVNGQNMIGFGEHTDPQIISLLRSNNTSGLQIFLRDGNWISVPPDHKSFFINVGDSLQVMTNGRFRSVKHRVLTNGFKSRLSMIYFGGPPLSEKIVPLSSLMKGKESLYKEFTWFEYKNLTYASRLADNRLGHFERIVAS

SEQ ID NO: 151 - DNA, 1002 bp, Glycine max
atggttgttttgtctcagccagcattaaaccagtttttccttctgaaaacatgcaagcccacgcccctgttctccgggattcccgtggtcgacctcacggaccccgatgccaagacccacatagtgaaggcctgcagggacttcggcttcttcaagctcgtgaaccacggtgttccattagagttcatggccaatttggaaaacgaaaccctcaggttcttcaaaaaacctcagtccgacaaagacagggctggtccccctgatccttttggctacggcagcaagaggattggccctaacggcgatgtcggttgggtcgaatacctccttctcaacaccaaccctgacgtcatctcccccaagtcacagttcattttccgagaaagtcctcagaatttcagggtggtcgttgaggagtacattagagcgctgaagaacatgtgctatgaggtgttggaattaatggcggagggcttgggaataactcagaggaatgcgttgagtaggttgctgaaggatgagaagagtgattcttgcttcagacttaaccactacccgccatgcccagaggtgcaagcattgaacggcagaaatttggttgggtttggagagcacacagacccacagataatttctgtcttgagatctaacagcacctcaggcctgcaaatctgtctcacagatggcacttgggtttcagtcccacctgatcaaacttcctttttcatcaatgttggtgacactctacaggtgatgactaatgggaggtttaaaagtgtaaagcatagagttttggctgacccaaccaagtcaaggttgtcaatgatctactttggaggagcacccttgagtgaaaagatatcacctttaccttctctcatgttaaaaggagaagagagtttctacaaagaattcacatggtgggaatacaagaaggctgcgtatgcgtcaaggctagcggataataggctcgctccttttgagaaatctgctgctgattaa

SEQ ID NO: 152 - protein, 333 aa, Glycine max
MVVLSQPALNQFFLLKTCKPTPLFSGIPVVDLTDPDAKTHIVKACRDFGFFKLVNHGVPLEFMANLENETLRFFKKPQSDKDRAGPPDPFGYGSKRIGPNGDVGWVEYLLLNTNPDVISPKSQFIFRESPQNFRVVVEEYIRALKNMCYEVLELMAEGLGITQRNALSRLLKDEKSDSCFRLNHYPPCPEVQALNGRNLVGFGEHTDPQIISVLRSNSTSGLQICLTDGTWVSVPPDQTSFFINVGDTLQVMTNGRFKSVKHRVLADPTKSRLSMIYFGGAPLSEKISPLPSLMLKGEESFYKEFTWWEYKKAAYASRLADNRLAPFEKSAAD

SEQ ID NO: 153 - DNA, 1026 bp, Glycine max
atggttgttcattctcaccaatctgcactaaacgagttatttctcgtgaaagcatcatgcaagagcaggttcatgtgggtgcccgaggttgatctcacgcaccccgaggccaagacggtcatagtcaaggcatgtcaagagttcggtttgttcaaggtggtcaactatggtgtaccactggaattgatgacccatttggagaatgaagcactcaagttcttcatgcagtcccaatgtcaaaaagacaaggctggtcctccagacccttatgggtatggaagcaagagaattggcacaaacggtgatctgggttgggttgagtacctactcctcaacacaaaccctgatgttatctctcccaaaacactccaactttttgaacaaaacccagaagtgttcaggtgcgcggtggaggaatacataggggcagtgaagaagatgtgctgtgaagtgttggagctaatggctgatgggttggagatagaaccaaggaacgtgttcagcagaatgataagggatgagagaagcgatagctgctttagaatgaaccggtacccagcatgtccagagcttagagttgaggcattgagtggacgaaatttgattgggttcggagagcacacagacccacagataatatctgtcctgagatccaacaacacatcaggactgcaaatgtgtctccgggatgggacttgggcttctatccaacctgatcacacttcctttttcgtcaatgttggtgaccttttgcaggtgatgacgaatggaagctttaaaagtgttaagcatagggtattagccaattcaagcatgtcaagactttcaatgatctactttggaggaccaccattgaatgaaaagattgcacctttaccttcactcgtgtcaagggaagaagagagtttgtacagagaattgacatggcgggaatacaagaatgcagcatacaagtcaaagctctctgataataggcttagtctttttgacaaatttgctgatcacagtgacaaatctccattgtga

SEQ ID NO: 154 - protein, 341 aa, Glycine max
MVVHSHQSALNELFLVKASCKSRFMWVPEVDLTHPEAKTVIVKACQEFGLFKVVNYGVPLELMTHLENEALKFFMQSQCQKDKAGPPDPYGYGSKRIGTNGDLGWVEYLLLNTNPDVISPKTLQLFEQNPEVFRCAVEEYIGAVKKMCCEVLELMADGLEIEPRNVFSRMIRDERSDSCFRMNRYPACPELRVEALSGRNLIGFGEHTDPQIISVLRSNNTSGLQMCLRDGTWASIQPDHTSFFVNVGDLLQVMTNGSFKSVKHRVLANSSMSRLSMIYFGGPPLNEKIAPLPSLVSREEESLYRELTWREYKNAAYKSKLSDNRLSLFDKFADHSDKSPL

SEQ ID NO: 155 - DNA, 1038 bp, Glycine max
atggttgttctttctcaccaatcagcactaaacgagttatttctcgtgaaaacatgcaagagcacgttcataggggtgcctgaggttgatctcacgcaccccgaggccaagacgaccatagtgaaggcatgtcaagagttcggtttgttcaaggtggtcaaccatggcgtgccgttggagttgatgacccatttggagaatgaagcgctcaagttcttcatgcagccacaatctctgaaagacaaggctggtcctcctgacccttatgggtatggaagcaaaagaattggcaccaacggtgatctgggttgggttgagtatctactcctcaacaccaaccctgatgttatctcccccaaaacacttcaactttttgaacaaaacccagaaatgttcaggtgtggagtggaggaatacataggggcagtgaagaagatttgctgtgaagcgttggagctaatggcagatgggttggaaatagtaccaaggaacgtgttcagcagaatgataagggacgagagaagcgatagttgcttcagaatgaaccggtacccagaatgtccagagcttaaggtagaagctttgagtggtcgaaatttgactgggtttggagaacacacagacccacagataatatctgtactgagatccaacaacacatcaggactgcaaatatgtctcccagatggagatggagatgggactacttgggcttcaatccagcctgatcacacttcctttttcatcaacgttggtgatctcttgcaggtgatgacgaatggaagctttaaaagtgttaagcatagggtattagttgattcaagcatgtcaagactttcaatgatttactttggaggaccacctttaaatgaaaagattgcacctttaccttcactcgtgtcaagggaagaagagagtttgtacagagagttgacatggctggaatacaagaatgctgcatacaagtcaaaactctctgataataggcttagtctctttgataaatctgctgatcacagtgacaaatctccattgtga

SEQ ID NO: 156 - protein, 345 aa, Glycine max
MVVLSHQSALNELFLVKTCKSTFIGVPEVDLTHPEAKTTIVKACQEFGLFKVVNHGVPLELMTHLENEALKFFMQPQSLKDKAGPPDPYGYGSKRIGTNGDLGWVEYLLLNTNPDVISPKTLQLFEQNPEMFRCGVEEYIGAVKKICCEALELMADGLEIVPRNVFSRMIRDERSDSCFRMNRYPECPELKVEALSGRNLTGFGEHTDPQIISVLRSNNTSGLQICLPDGDGDGTTWASIQPDHTSFFINVGDLLQVMTNGSFKSVKHRVLVDSSMSRLSMIYFGGPPLNEKIAPLPSLVSREEESLYRELTWLEYKNAAYKSKLSDNRLSLFDKSADHSDKSPL

SEQ ID NO: 157 - DNA, 984 bp, Glycine max
atggtgttgttgtccaaagcaacaacagaacaatactcctacattaagaactgcatgccaaccaaattttcctcaacaattcccatagtggacctctccaaacctgatgcaaagacccttatagtgaaggcttgtgaggagtttggattcttcaaagtcatcaatcatggtgtctccatggaagctatatccgaattggaatatgaagccttcaaattcttctctatgtcactcaatgaaaaggaaaaagtaggacctcccaatccatttgggtatggtagcaagaaaattggacacaatggggacgttggttggattgagtaccttcttctcaacaccaatcaagaacacaacttctctgtttatggcaaaaaccctgagaaattcaggtgtctgttgaacagttacatgtcttctgtgaggaagatggcatgtgagattcttgagttgatggcagaagggttgaagattcagcaaaaggatgtgtttagcaagcttctaatggataaacaaagtgactctattttcagggtgaatcattaccctgcttgtcctgaaatgactctgaatgatcagaacttgattgggtttggagaacacacagacccacaaatcatctctctgttaagatccaacaacacttcaggccttcagatttatcttagagatggaaattggatttcagtcccaccagatgacaaatccttttttattaacgttggtgattctcttcaggttatgacaaatggaaggttccgaagtgtgagacacagagtgttggcaaatgggttcaagtccaggctttcaatgatttactttggaggtccacctttgagtgagaaaatagcaccattatcctctctcatgaaaggaaaagaaagtctatataaagagtttacctggtttgagtacaaaaaatcaatctacggttcaagattatctaaaaatagacttgaacattttgaaagaattgcagcttcgtaa

SEQ ID NO: 158 - protein, 327 aa, Glycine max
MVLLSKATTEQYSYIKNCMPTKFSSTIPIVDLSKPDAKTLIVKACEEFGFFKVINHGVSMEAISELEYEAFKFFSMSLNEKEKVGPPNPFGYGSKKIGHNGDVGWIEYLLLNTNQEHNFSVYGKNPEKFRCLLNSYMSSVRKMACEILELMAEGLKIQQKDVFSKLLMDKQSDSIFRVNHYPACPEMTLNDQNLIGFGEHTDPQIISLLRSNNTSGLQIYLRDGNWISVPPDDKSFFINVGDSLQVMTNGRFRSVRHRVLANGFKSRLSMIYFGGPPLSEKIAPLSSLMKGKESLYKEFTWFEYKKSIYGSRLSKNRLEHFERIAAS

SEQ ID NO: 159 - DNA, 999 bp, Glycine max
atggcagagcaatcaggaagaaaagtggtggtgttgtccaaagcaacaacagaacaatactctaacatcaagaattgtatgccaaccacattctcctcaacaattcccatagtggacctctccaaacccgatgcaaagaccctcatagtgaaggcttgcgaggagtttggattcttcaaagtcatcaaccatggtgtccccatggaagttatatctgaattggaatctgaagccttcaagttcttttctttgccactcaatgagaaggaaatagttgggcctcctaatccatttgggtatggtaacaagaaaattggacgcaatggggacattggttgtgttgagtaccttctactcagcaccagtcaagaacacaacctctctctttatggcaaaaaccctgagaaattcaggtgtttgttgaacaattacatgtcttctataaggaaaatggcatgtgagattcttgagttgatggcagaagggttgaagattcagcaaaaagatgtgtttagtaagcttttaatagataaacagagtgactctgtttttagggtgaatcattaccctgctaactctaaaattcctgtgaatgatcaaagcttgattgggtttggagaacacaccgacccacaaatcatttctctacttaggtcaaacaatacttcaggccttcagatttgtcttaaagatggagattggatttcagtcccacatgatcagaaatctttcttcatcaatgttggtgattctctccaggttatgaccaatggacgattccatagtgtgaaacatagggttttgactaatgaattcaagtccaggctctctatgatttactttggaggtccacctcttgatgagaaaataacaccattaccgtctatcatgaaagggaaagaaagtctatacaaagaatttacgtggtccgagtacaagaattttacttatggtacaaaattggctgataatagacttggacattttgagagaaattag

SEQ ID NO: 160 - protein, 332 aa, Glycine max
MAEQSGRKVVVLSKATTEQYSNIKNCMPTTFSSTIPIVDLSKPDAKTLIVKACEEFGFFKVINHGVPMEVISELESEAFKFFSLPLNEKEIVGPPNPFGYGNKKIGRNGDIGCVEYLLLSTSQEHNLSLYGKNPEKFRCLLNNYMSSIRKMACEILELMAEGLKIQQKDVFSKLLIDKQSDSVFRVNHYPANSKIPVNDQSLIGFGEHTDPQIISLLRSNNTSGLQICLKDGDWISVPHDQKSFFINVGDSLQVMTNGRFHSVKHRVLTNEFKSRLSMIYFGGPPLDEKITPLPSIMKGKESLYKEFTWSEYKNFTYGTKLADNRLGHFERN

SEQ ID NO: 161 - DNA, 1002 bp, Glycine max
atggttgttctgtctcagccagcattaaaccagtttttccttctgaaaacatgcaagcccacgcccttgttcgcggggattcctgtggtcgacctcacggaccccgatgccaagacccacatagtcaatgcctgcagggacttcggcttcttcaagctcgtgaaccacggtgttccgttacagttcatggccaatttggaaaacgaaaccctcgggttcttcaaaaaacctcaatccgagaaagacagggctggtccccctgacccttttggctacggcagcaagaggattggccctaacggcgatgtcggttgggtcgaatacctccttctcaacaccaaccctgatgtcatctcccccaagtcacagttcattttcagagaaggtcctcagaatttcagggcggtggtggaggaatacattagagcggtgaagaacatgtgctatgaggtgttggaattgatggctgagggattggggataacgcagaggaatgtgttgagtaggttgctgaaggatgagaagagtgattcttgcttcagacttaaccactacccgccatgcccggaggtgcaagcattgaacggaaggaatttggttggatttggagagcacacagacccacagataatttctgtcttgagatctaacagcacctcaggcctgcaaatctgtctcacagatggcacttgggtttctgtcccacctgatcaaacttcctttttcatcaatgttggtgacactcttcaggtaatgactaatgggaggtttaaaagtgtaaagcatagagttttggctgacccaaccaagtcaaggttgtcaatgatctactttggaggaccacccttgtgtgaaaagatagcacctttaccttcactcatgttaaaaggagaagagagtttctacaaagagttcacatggtgggaatacaagaaggctgcgtacgcgtcaaggctagcggataatagactcggcccttttgagaaatctgctgctgattaa

SEQ ID NO: 162 - protein, 333 aa, Glycine max
MVVLSQPALNQFFLLKTCKPTPLFAGIPVVDLTDPDAKTHIVNACRDFGFFKLVNHGVPLQFMANLENETLGFFKKPQSEKDRAGPPDPFGYGSKRIGPNGDVGWVEYLLLNTNPDVISPKSQFIFREGPQNFRAVVEEYIRAVKNMCYEVLELMAEGLGITQRNVLSRLLKDEKSDSCFRLNHYPPCPEVQALNGRNLVGFGEHTDPQIISVLRSNSTSGLQICLTDGTWVSVPPDQTSFFINVGDTLQVMTNGRFKSVKHRVLADPTKSRLSMIYFGGPPLCEKIAPLPSLMLKGEESFYKEFTWWEYKKAAYASRLADNRLGPFEKSAAD

SEQ ID NO: 163 - DNA, 984 bp, Glycine max
atgcttaatgagtcatgtcttgtgaagacatgcaaaccttctatcatgttcactagggttcctgaggtcgatctctcggaccccgaggccaagtcactcattatcaaggccagcaaagagtgtggtttctttaaggtagtccaacatggcgttgcgtttgagttgattacaaatttggagaacgaagtccttagatttttccatcaaccacagccacaaaaggacaaggtggttcctcctgatccttgtggttatggaagcaggaaaattggagccaatggtgatgaaggttggctcgagtacctcctcatcaacactaaccctgatgatccaaagtcacttcacctttttcagcaaaacccagcaaatttcaggtctgctgtggaggattatataggagcagttaagaatttgtgctctgatgtgttggaacttatggctgatgggttgggagttgagccgaggaatgtgtttagtaggcttacaatggatgagagaagcgattgcttattaagggttaatcgctaccccgtatgtgcagagcttgatgaatttgaagcattgagtgaacaatatttaattgggtttggcgaacacacagacccacagataatatctgtactgagatcgaataacagtcacggactacaaatctgtctccgagatggaacttgggcttcaattccaccagatcagacttctttcttcgtcattgttggtgacctcttgcaggtgatgactaatgggagatttaaaagtgtaaagcatagggtattgactgactcaaccatttcaagaatttcaataatctactttggaggaccacccttgaatgaaaatattgctcctttaccttcactcgtgctaaaggaagaagagagtttgtataaagagttaacgtggcaggaatacaagactgctacgttcaagtcaaggttgtctgataataggctaagactctttgagaaatttcctagtgagtga

SEQ ID NO: 164 - protein, 327 aa, Glycine max
MLNESCLVKTCKPSIMFTRVPEVDLSDPEAKSLIIKASKECGFFKVVQHGVAFELITNLENEVLRFFHQPQPQKDKVVPPDPCGYGSRKIGANGDEGWLEYLLINTNPDDPKSLHLFQQNPANFRSAVEDYIGAVKNLCSDVLELMADGLGVEPRNVFSRLTMDERSDCLLRVNRYPVCAELDEFEALSEQYLIGFGEHTDPQIISVLRSNNSHGLQICLRDGTWASIPPDQTSFFVIVGDLLQVMTNGRFKSVKHRVLTDSTISRISIIYFGGPPLNENIAPLPSLVLKEEESLYKELTWQEYKTATFKSRLSDNRLRLFEKFPSE

SEQ ID NO: 165 - DNA, 1071 bp, Glycine max
atggttgccccttgtccaacatccatgatggtaagaaccaagaaaacaaaggccatgggagttccgacgatagacctttccctggaaagatcgaagttggcagaactagtggtgaaagcatgtgaggaatacggtttcttcaaggtggtgaatcacagtgtgccaaaggaggttattgcaagattggaagaggagggaaaggagtttttctccaaaacctcctcggagaagcgccaagctggccctgccaatccttttggctatggctgcagaaatattggccccaatggtgatatgggtcacctcgagtatctcctccttcataccaatcctctttctatatctgagagatccaaaaccatagcaaaagaccctactaagttcagttgtgtcgtgaatgattacatagaagcagctaaggaactaacatgtgagcttcttgatctggtggcggagggtttgtgggtccaagacaaattctcactcagcaagctcatcagagacgttcatagtgactcacttctaaggatcaatcaataccctcccgtgagcctaaagggcaccaagaattgggacacgtccaaagttgaggcacgtcaaatccagagccaaaataataacaacaacaacaacaacaacattggctttggagagcattctgaccctcagatcttgaccatcatgcggtccaacaacgttgatggccttcagatttccacccacgatggcttgtggatccctgtcccccctgaccccaatgaattcttcgttatggttggcgatgccttgcaggttttgacaaatggaaggtttgcaagcgtgagacacagggtgttgacgaacacaacaaaggccagaatgtcaatgatgtactttgcagcaccaccgctgaataggtggatcactccactgccaatgatggtgacaccccacaatccaagtctctataagccctttacgtgggcccaatacaagcaagcagcatactctctaagattgggagacgctcgccttgacctcttcaagatccaacgacaacaagatacccatctcgcacctgcttctccctga

SEQ ID NO: 166 - protein, 356 aa, Glycine max
MVAPCPTSMMVRTKKTKAMGVPTIDLSLERSKLAELVVKACEEYGFFKVVNHSVPKEVIARLEEEGKEFFSKTSSEKRQAGPANPFGYGCRNIGPNGDMGHLEYLLLHTNPLSISERSKTIAKDPTKFSCVVNDYIEAAKELTCELLDLVAEGLWVQDKFSLSKLIRDVHSDSLLRINQYPPVSLKGTKNWDTSKVEARQIQSQNNNNNNNNNIGFGEHSDPQILTIMRSNNVDGLQISTHDGLWIPVPPDPNEFFVMVGDALQVLTNGRFASVRHRVLTNTTKARMSMMYFAAPPLNRWITPLPMMVTPHNPSLYKPFTWAQYKQAAYSLRLGDARLDLFKIQRQQDTHLAPASP

SEQ ID NO: 167 - DNA, 1071 bp, Glycine max
atggttgcgccttgtccaacatccatgatggtaagaaccaagaaaacaaaggccatgggagttccgacaatagacctttcaatggaaaggtccaagttgtcggaactggtggtgaaagcatgtgaggaatatggtttcttcaaggtggtgaaccacagtgtgcaaaaagaggtcattgcaagattggaagaggagggaaaggagtttttctccaaaacctcctcggagaagcgccaagctggccctgccaatccttttggctatggttgcagaaatattggccccaatggcgatatgggtcacctcgagtatctcctccttcataccaaccctctttccatatctgagagatccaaaaccatagcaaatgaccctactaagttcagttgtgccgtgaatgattacatagaagcagttaaagaactaacatgtgaggttctcgatatggtggaggagggtttgtgggtccaagacaagttctcactcagcaagctcatcagagacgtccatagtgactcactcctaaggatcaatcaataccctcccgtgagcctaaagggcaccaagaattgggacacgtccaaacttgaggcacatcaactccagagccaaaataataataacaacaacaacaatattggctttggagagcattctgaccctcagatcttgaccatcatgcggtccaacaacgttgatggccttcagatttccacccacgatggcttgtggatccctgtcccccctgaccccaatgaattcttcgttatggttggtgatgccttgcaggttttgacaaatggaaggtttgtaagcgtgagacacagggtgttgacgaacacaacaaaggccagaatgtcaatgatgtactttgcagcaccaccgctgaattggtggatcactccactgccgaagatggtgacaccccacaatccaagtctctataagcccttcacctgggcccaatacaagcaggcagcatattctctaagattgggagacgctcgccttgacctcttcaagatccaacgacaacaagatacccatctcatcgcacctgcttcaacctga

SEQ ID NO: 168 - protein, 356 aa, Glycine max
MVAPCPTSMMVRTKKTKAMGVPTIDLSMERSKLSELVVKACEEYGFFKVVNHSVQKEVIARLEEEGKEFFSKTSSEKRQAGPANPFGYGCRNIGPNGDMGHLEYLLLHTNPLSISERSKTIANDPTKFSCAVNDYIEAVKELTCEVLDMVEEGLWVQDKFSLSKLIRDVHSDSLLRINQYPPVSLKGTKNWDTSKLEAHQLQSQNNNNNNNNIGFGEHSDPQILTIMRSNNVDGLQISTHDGLWIPVPPDPNEFFVMVGDALQVLTNGRFVSVRHRVLTNTTKARMSMMYFAAPPLNWWITPLPKMVTPHNPSLYKPFTWAQYKQAAYSLRLGDARLDLFKIQRQQDTHLIAPAST

SEQ ID NO: 169 - DNA, 1002 bp, Glycine max
atggtgttggcttccccaaacccaataaggagcgaagggattctacccagtaacgagcttattcccgttgtggacctcacagcagaaaggtcagaagtggcaaagctcatagtgaaagcgtgcgaagagtacggtttcttcaaggtgataaaccacggtataagccacgaagtgatatcaaaaaccgaagaagcagggtttagtttcttcgaaaaaccggtggcagagaagagagtggcagcacctgcatatgggtgcaagaacatagggttgaatggggacatgggtgaggtggagtaccttgtcctcggtgccaccactcactccattgctcagatatccaaaactgtatccactgacccattaaacttcagctctacattgagtgcatacacagaagcagtgagggagctggcatgtgagatattggaactaatagcagagggcttgggggtcccggacactagggcattcagcaggttcataagggatgttgatagtgactcagttctcaggctcaatcactacccacctataattaacaaggacaaggacaaggacatgtcacaatatagcaaggttggttttggagagcattctgaccctcagatcataaccattctcagatccaacgacgtgggtggcctccaaatttcccttcaagatggggtgtggatcccagttacccctgacccctcagcattctatgtgaacgtgggtgatgtactagaggttatgacaaatggaagatttgtaagcgtgagacacagggctatgacgaactcatacaagtgtagaatgtcagtggcatattttggggctccacccctccatgctaccattgttgctccctcagttatggtcacaccccagaggccctctctctttcgaccattcacttgggccgactacaagaaagccacctactctctcaggcttggagacacacgcattcagcttttcacaaatagactaaccactaatcaccacccaaaagtctag

SEQ ID NO: 170 - protein, 333 aa, Glycine max
MVLASPNPIRSEGILPSNELIPVVDLTAERSEVAKLIVKACEEYGFFKVINHGISHEVISKTEEAGFSFFEKPVAEKRVAAPAYGCKNIGLNGDMGEVEYLVLGATTHSIAQISKTVSTDPLNFSSTLSAYTEAVRELACEILELIAEGLGVPDTRAFSRFIRDVDSDSVLRLNHYPPIINKDKDKDMSQYSKVGFGEHSDPQIITILRSNDVGGLQISLQDGVWIPVTPDPSAFYVNVGDVLEVMTNGRFVSVRHRAMTNSYKCRMSVAYFGAPPLHATIVAPSVMVTPQRPSLFRPFTWADYKKATYSLRLGDTRIQLFTNRLTTNHHPKV

SEQ ID NO: 171 - DNA, 990 bp, Glycine max
atggtgttggcttccccaaactcaataaggagcgaagggattctacccagcaacgagcttattcccgttgtggacctaacagcagaaaggtcacaagtgacaaagctcatagtgaaagcgtgcgaagagtacggtttcttcaaggtgataaaccacggtataagccacgaagtgatatcaaaaactgaagaagcagggtttagtttctttacaaaaccggtggcagagaagaaagtggcagcacctgcatatgggtgcaagaacatagggttgaatggggacatgggtgaggtggagtaccttctcctcagtgccaccactcactccatttctcagatatccaaaactatatccactgacccattaaacgtcagctctacattgagtgcatacacagaagcagtgagggagctcgcatgtgagatattggagctaatagcagaggggttgggggtcccggacacttggatattcagcaggttcataagggatgttgacagtgactcagttctaaggctcaatcactacccacctataattaacaaggacaacaacaaagacatgtcacaaaaatttaccaaggttggctttggagagcattctgatcctcagatcataaccattctcagatccaacgaagtgggtggcctccaaatttcccttcaagatggggtctggatcccagtcacccctgacccctcagcattctatgtgaacgtgggtgatgtactagaggttatgacaaatggaagatttgtaagcgtgagacacagggctatgacgaactcatacaagtgtagaatgtcagtggcatattttggggctccacccctccatgctaccattgttgctccctcagttatggtcacacctcagaggccctctctcttccgaccattcacttgggccgaatacaagaaagcaacttactctctcaggcttggagacacacgcattcaacttttcacaaataaactaaaccactcatga

SEQ ID NO: 172 - protein, 329 aa, Glycine max
MVLASPNSIRSEGILPSNELIPVVDLTAERSQVTKLIVKACEEYGFFKVINHGISHEVISKTEEAGFSFFTKPVAEKKVAAPAYGCKNIGLNGDMGEVEYLLLSATTHSISQISKTISTDPLNVSSTLSAYTEAVRELACEILELIAEGLGVPDTWIFSRFIRDVDSDSVLRLNHYPPIINKDNNKDMSQKFTKVGFGEHSDPQIITILRSNEVGGLQISLQDGVWIPVTPDPSAFYVNVGDVLEVMTNGRFVSVRHRAMTNSYKCRMSVAYFGAPPLHATIVAPSVMVTPQRPSLFRPFTWAEYKKATYSLRLGDTRIQLFTNKLNHS

SEQ ID NO: 173 - DNA, 1032 bp, Glycine max
atggttgtgccttctccttctccaacttctatcaagacaagttacaagaaaaagaagacgataataaaaattccaacgatagacctatccatggaaaggacagagttgtcggaaacagtggtgaaagcctgcgaggaatacggcttcttcaaggttgttaaccacaatgttccgaaggaggttattgcaagaatggaagaagagggtgcagagttttttggcaaagccacctacgagaagcgtggagctggcccagcaagtcctttcggttatggcttcagcaatatcgggcccaacggagatatgggtgacctagagtatcttctgcttcatgctaaccctctttccgtctctgagagatccaaaaccatcgctaatgactccaccaagttcagttgtgttgtgaatgattatgtagaagcagtaaaagaagtaacgtgcgagattttagatctggtggttgagggattaggggtcccagacaagttcgcactaagcaggctcattagagatgtgaatagtgattcagttctgaggatcaatcactaccctccattgaaccagaaggtgaagggcaacaagaatagcattggttttggggcgcattctgaccctcagatcttgaccatcatgcggtccaatgacgtgggtgggcttcaaatttacacccgtgatgggttgtggattcctgtccctcctgaccccaatcaattctttgtcatggtgggtgatgtcttccaggttttgacaaatggaaagttcatgagtgtgaggcacagggcattaaccaacacattgaaggcaaggatgtcaatgatgtactttgcagcaccaccacttgattggtggatcactccgctacccaagatggtgtcaccaccacaaaatccaagtctatataagcccttcacatgggcccagtacaagaaagcaacatattccttacgcctcggagattctcgacttgatctcttcaaggcccagctagatacccatcatgtatctgcctctccatcacaaattcaatgttag

SEQ ID NO: 174 - protein, 343 aa, Glycine max
MVVPSPSPTSIKTSYKKKKTIIKIPTIDLSMERTELSETVVKACEEYGFFKVVNHNVPKEVIARMEEEGAEFFGKATYEKRGAGPASPFGYGFSNIGPNGDMGDLEYLLLHANPLSVSERSKTIANDSTKFSCVVNDYVEAVKEVTCEILDLVVEGLGVPDKFALSRLIRDVNSDSVLRINHYPPLNQKVKGNKNSIGFGAHSDPQILTIMRSNDVGGLQIYTRDGLWIPVPPDPNQFFVMVGDVFQVLTNGKFMSVRHRALTNTLKARMSMMYFAAPPLDWWITPLPKMVSPPQNPSLYKPFTWAQYKKATYSLRLGDSRLDLFKAQLDTHHVSASPSQIQC

SEQ ID NO: 175 - DNA, 1029 bp, Glycine max
atggttgtgctttctccttctccaacttccatcaagacaagctacaagaaaaaaaagacaatgaaaattccaacgatagacctatccatggaaaggacagagttgtcggaaacagtggtgaaagcctgcgaggaatacggtttcttcaaggtgattaaccacaatgttccgaaggaggttattgcaagaatggaagaggagggtgcaaagtttttcgccaaacccacccacgagaagcgtcgagctggcccagcaagtcctttcggttatggcttcaccaatatcgggcccaacggagataagggtgacctagagtatctcttgcttcatgccaaccctctttccgtctctcagagatccaaaaccatcgctagtgactccaccaagttcagttgtgttgtgaatgattatgtagaagcagtgaaagaagtaacgtgtgagattttagatctggtgcttgagggattaggagtcccagagaagtttgcactaagcaagctcattagagatgttaatagtgattgtgttctaaggatcaatcactaccctccattgaaccagaagttgaagggcaacaagaatagcattggttttggggcgcattctgaccctcagatcttgacaatcatgcgttccaatgacgtgggtgggcttcaaatttacacccgtgaagggttgtggattcctatccctcctgaccccaatcaattctttgtcatggtgggcgatgtcttccaggttttgacaaatggaaagttcatgagtgtgaggcacagggcattaaccaacacattgggggcaaggatgtcaatgatgtactttgcagcaccaccacttgattggtggatcactccgctagccaagatggtgtcaccaccacaaaatccaagtctatataagcccttcacatgggaccactacaagaaggcaacatattccttacgcctcggagattctcgacttgatctcttcaaggcccagctagatacccatcatgtatctgtctctccatcacaaattcaatgttaa

SEQ ID NO: 176 - protein, 342 aa, Glycine max
MVVLSPSPTSIKTSYKKKKTMKIPTIDLSMERTELSETVVKACEEYGFFKVINHNVPKEVIARMEEEGAKFFAKPTHEKRRAGPASPFGYGFTNIGPNGDKGDLEYLLLHANPLSVSQRSKTIASDSTKFSCVVNDYVEAVKEVTCEILDLVLEGLGVPEKFALSKLIRDVNSDCVLRINHYPPLNQKLKGNKNSIGFGAHSDPQILTIMRSNDVGGLQIYTREGLWIPIPPDPNQFFVMVGDVFQVLTNGKFMSVRHRALTNTLGARMSMMYFAAPPLDWWITPLAKMVSPPQNPSLYKPFTWDHYKKATYSLRLGDSRLDLFKAQLDTHHVSVSPSQIQC

SEQ ID NO: 177 - DNA, 972 bp, Glycine max
atggtagcacctttcccaatttccactcgaagcgaaaagattttacccattgaccttcccgtggtagacctaaccgcggaaagatcaatggtgacaaaactcattgtgaaggcgtgtgaggaatatggtttcttcaacgtgattaaccatggcattcctcgtgacaccatagctgaaatggaagaaacagcttttgatttctttgccaaaccaatggctcaaaagaaacaacttgccctctatggctgcaagaacataggcttcaatggagacatgggagaggtcgagtaccttctcctcagtgctactcctccctctatttctcacttcaaaaacatctccaatatgccatcaaaattcagctctagtgtgagtgcatacacagagggtgtgagggagctggcatgtgagattttggagctaatggcagagggtctgggggtcccggatacatggtttttcagcaggttgatcagggaggttgatagtgactcagtccttaggttcaatcactacccacctattatacttaacaacaaagattgcaaggacaaccacaaccacaccaaggtaattggctttggggagcattctgaccctcagattcttaccatcctcagatccaacgacgtgggtggcctccaaatctctcttcaagatggtgtgtggaacccagttgcccctgacccctcagctttctgtgttaatgtgggtgatctcttacaggttatgacaaatgggagatttgtgagcgtgagacacagggccatgaccaactcacacaagtctagaatgtcggttgcatattttggtggtccaccacttgatgcatgcattgttgctcccccagttatggttacacccgagaggccctctcttctcttcaagccatttacttgggctgaatacaagaaagtcacctattctatgaggcttggagaacaccgcattgaccttttcaggagcaactag

SEQ ID NO: 178 - protein, 323 aa, Glycine max
MVAPFPISTRSEKILPIDLPVVDLTAERSMVTKLIVKACEEYGFFNVINHGIPRDTIAEMEETAFDFFAKPMAQKKQLALYGCKNIGFNGDMGEVEYLLLSATPPSISHFKNISNMPSKFSSSVSAYTEGVRELACEILELMAEGLGVPDTWFFSRLIREVDSDSVLRFNHYPPIILNNKDCKDNHNHTKVIGFGEHSDPQILTILRSNDVGGLQISLQDGVWNPVAPDPSAFCVNVGDLLQVMTNGRFVSVRHRAMTNSHKSRMSVAYFGGPPLDACIVAPPVMVTPERPSLLFKPFTWAEYKKVTYSMRLGEHRIDLFRSN

SEQ ID NO: 179 - DNA, 1035 bp, Gossypium hirsutum
atgaccaactcagacccacctctccttaaccattatggagcacttttttcaagcaactcacctcaactcgatgaccctaaaaaccgacttgtcattgaagaatgccaacttcctttgattgacttgagtggtctaagcaatcacgacgaaacggttcgccgagcttgtgttgctgccatatgtggggcatcatcagaatggggatttttccaagtgttgaaccatgggattagccctcaactagttgagcaaatgagaagtgaacaagtgaagttgttcaaaataccctttgaaaggaaagctagctgtggacttttgaataattcttacagatggggaagtcctagggctacctgtcctaaacagttctcatggtctgaggctttccatgtccctcttaccaaggtttcagatgaagcttgttatggagagtttatatctttaagggcagtgatgatagaatttgcagctgccatgtcgaaacttgcaggacttctaggaagcattttgacagcgaatttgggacatggaaaggaagtgatcaagaatttatgcgacgaaggcacctgcttccttcgcctgaaccactacccggcctgtccgatatctccggagattttgggtttagtgtgccacaccgatagtgatttcctcacaattctatgtcaagatcaggtaggaggacttcaactcatgaaggactccaagtgggtaactgtcaaacctaaccgagatgctcttatagtcaacattggcgacctcttccaggcatggagcaatggtgtttacaaaagcgtggagcataaggtggtgactaatgcaaagatggagagatactccatagcttatttcctgtgcccctcttacgattcttcgattgggagcttcaaagaaccttcaatctacagaaaatttactttcagggaatatagagaccaagttcaagaagatgtaaggaaaaccggctacaaggttggccttccacggtttctagttagtgggagaggggatttattgacaggaagcatggagtaa

SEQ ID NO: 180 - protein, 344 aa, Gossypium hirsutum
MTNSDPPLLNHYGALFSSNSPQLDDPKNRLVIEECQLPLIDLSGLSNHDETVRRACVAAICGASSEWGFFQVLNHGISPQLVEQMRSEQVKLFKIPFERKASCGLLNNSYRWGSPRATCPKQFSWSEAFHVPLTKVSDEACYGEFISLRAVMIEFAAAMSKLAGLLGSILTANLGHGKEVIKNLCDEGTCFLRLNHYPACPISPEILGLVCHTDSDFLTILCQDQVGGLQLMKDSKWVTVKPNRDALIVNIGDLFQAWSNGVYKSVEHKVVTNAKMERYSIAYFLCPSYDSSIGSFKEPSIYRKFTFREYRDQVQEDVRKTGYKVGLPRFLVSGRGDLLTGSME

SEQ ID NO: 181 - DNA, 1077 bp, Gossypium hirsutum
atgcacctcacctctaggaagtatattttcatttctatagcaatgaccaactcagacccacctctccttaaccattatggagcaattttttcaagccactcacctcaactcgatgtcactaaaaacagacttgtcatcgaagaatgccaacttcctttgattgacttgagtggtctaagcaatcacgacgaaacggttcgccgagcttgtgttgcagccatatgcggcgcatcatcagaatggggatttttccaagtgttgaaccatgggattagccctcaactagttgagaaaatgagaagtgaacaagtgaagttgttcaaaataccctttgaaaggaaagctagttgtggacttttgaataattcttacagatggggaagtccgaggtctacctgtcctaaacagttctcatggtctgaggctttccatatccctcttaccaaggtttcagatgaagcttgttatggagagtttatatctttaagggcagtgatgatagaatttgcagctgccatgtcgaaacttgcaggatttctaggaagcgttttgacagcgaatttgggacatggaaaggaagtgatcaagaatttatgcgacgaaggcacctgcttccttcgcctgaatcactacgcggcctgtccgatatctccggagattttgggtttagtgcgccacatcgatagtgatttcctcacaattctatgtcaagatcaggtaggaggacttcaactcatgaaggactccaagtgggtaactgtcaaacctaaccgagatgctcttatagtcaacattggcgacctcttccaggcatggagcaatggtgtttacaaaagcgtggagcataaggtggtgactaatgcaaagatggagagatactccatagcttatttcctgtgcccctcttacgattcttcgattgggagcttcaaagaaccttcaatctacagaaaatttactttcagggaatatagagaccaagttcaagaagatgtaagaaaaaccggctacaaggttggccttccacggtttctagttagtgggagaggggatttaattacaggaaacatggagtaa

SEQ ID NO: 182 - protein, 358 aa, Gossypium hirsutum
MHLTSRKYIFISIAMTNSDPPLLNHYGAIFSSHSPQLDVTKNRLVIEECQLPLIDLSGLSNHDETVRRACVAAICGASSEWGFFQVLNHGISPQLVEKMRSEQVKLFKIPFERKASCGLLNNSYRWGSPRSTCPKQFSWSEAFHIPLTKVSDEACYGEFISLRAVMIEFAAAMSKLAGFLGSVLTANLGHGKEVIKNLCDEGTCFLRLNHYAACPISPEILGLVRHIDSDFLTILCQDQVGGLQLMKDSKWVTVKPNRDALIVNIGDLFQAWSNGVYKSVEHKVVTNAKMERYSIAYFLCPSYDSSIGSFKEPSIYRKFTFREYRDQVQEDVRKTGYKVGLPRFLVSGRGDLITGNME

SEQ ID NO: 183 - DNA, 1083 bp, Gossypium hirsutum
atggttcattcagattcagacccacctctccttaaccattatggtacacttttatgccactccactcaatgggatgaacctcaaacccgagttaccatggaagaatgccagcttccattgattaacttgtgtgatttaggcagtgacgacgaaatggttcgccgagcttgtgctgccgccatttgcaaagcatcatcggaatggggctttttccaagtggtgaaccatggcattagctctcaactagtcgacaagatgagatgcgagcaagtgaaattattccgagcaccctttgaaacgaaagccaccagtggactgttgaataattcttacaggtggggaagccctagggctacttgtcctaaccaattctcctggtccgaagcttttcatgtccctctcaccaaagtctcgaatgaagcttgctatggagacttcaaatctttaagggaagtgatgacatgttttgcagcagccatgtcggagctgtcgaggcttctagcagggatcctgactgaaaatctgggcaactggaaacaagcatcgatcagcaacatatgcgacgaaacaacatgtttccttcgcctgaatcactacccagcatgtccaatatctccggagattttcggtttagtgcctcacaccgacagcgatttcctaacgattctttgccaagatcaagttggagggcttcaactcatgaaagactccaaatgggtgaccgtcaaacctaacaaagatgctcttatagtcaacattggggaccttttccaggcatggagcaatgatgtttacaaaagcgtggaacacaaggtggtttccaatgcaacaacggacagatactccatagcttatttcctttgcccttcttacgattctttgatcgagagcttcgtaaaaccttccatttacagaagatttactttcagggaatacagagaacaagttcaagaagatgtcagaaaaacagggtacaaggttggccttcccaggtttctacttaagggctccgaggacttaacaacaacaacaacagagtcaaatactagactatatattccaagcataacagccaagagctaa

SEQ ID NO: 184 - protein, 360 aa, Gossypium hirsutum
MVHSDSDPPLLNHYGTLLCHSTQWDEPQTRVTMEECQLPLINLCDLGSDDEMVRRACAAAICKASSEWGFFQVVNHGISSQLVDKMRCEQVKLFRAPFETKATSGLLNNSYRWGSPRATCPNQFSWSEAFHVPLTKVSNEACYGDFKSLREVMTCFAAAMSELSRLLAGILTENLGNWKQASISNICDETTCFLRLNHYPACPISPEIFGLVPHTDSDFLTILCQDQVGGLQLMKDSKWVTVKPNKDALIVNIGDLFQAWSNDVYKSVEHKVVSNATTDRYSIAYFLCPSYDSLIESFVKPSIYRRFTFREYREQVQEDVRKTGYKVGLPRFLLKGSEDLTTTTTESNTRLYIPSITAKS

SEQ ID NO: 185 - DNA, 1086 bp, Gossypium hirsutum
atggttcattcagattcagacccacctctccttaaccattatggtacacttttatgccactccactcaatgtgatgaacctcaaacccgagttaccatggaagaatgccagcttccattgattgacttgtgtgatttaggcagtgacgacgaaatggttcgccgagcttgtgctgccgccatttgcaaagcatcatcggaatggggctttttccaagtggtgaaccatggcattagctctcaactagtcgacaagatgagaagcgagcaagtgaaattattccgagcaccctttgaaacgaaagccaccagtggactgttgaataattcttacaggtggggaagccctagggctacttgtcctaaccaattctcctggtccgaagcttatcatgtccctctcaccaaagtctcagatgaagcttgctatggagacttcaaatctttaagggaagtgatgacatgttttgcagcagctatgtcggaactgtcgaggcttctagcagggatcctgactgaaaatctgggccactggaaacaagcatcgatcagcaacatatgcgacgaaacatgtttccttcgcctgaatcactacccagcatgtccaatatctccggagattttcggtttagtgccccacaccgacagcgatttcctaacgattctttgccaagatcaagttggagggcttcaactcatgaaagactccaaatgggtgactgtcaaacctaacaaagatgctcttatagtcaacattggggaccttttccaggcatggagcaatgatgtttacaaaagcgtggaacacaaggtggtttccaatgcaacaacggacagatactccatagcttatttcctttgcccttcttacgattctttgatcgagagcttcgtaaaaccttccatttacagaagatttactttcagggaatacagagaacaagttcaagaagatgtcagaaaaacagggtacaaggttggccttcccaggtttctacttaaaggctccgaggatttaacaacaacaacaacaacaacagagtcaaataccagactatacattccaagcataacagccaagagctaa

SEQ ID NO: 186 - protein, 361 aa, Gossypium hirsutum
MVHSDSDPPLLNHYGTLLCHSTQCDEPQTRVTMEECQLPLIDLCDLGSDDEMVRRACAAAICKASSEWGFFQVVNHGISSQLVDKMRSEQVKLFRAPFETKATSGLLNNSYRWGSPRATCPNQFSWSEAYHVPLTKVSDEACYGDFKSLREVMTCFAAAMSELSRLLAGILTENLGHWKQASISNICDETCFLRLNHYPACPISPEIFGLVPHTDSDFLTILCQDQVGGLQLMKDSKWVTVKPNKDALIVNIGDLFQAWSNDVYKSVEHKVVSNATTDRYSIAYFLCPSYDSLIESFVKPSIYRRFTFREYREQVQEDVRKTGYKVGLPRFLLKGSEDLTTTTTTTESNTRLYIPSITAKS

SEQ ID NO: 187 - DNA, 1020 bp, Gossypium hirsutum
atggttgtgcattcacagtctgcagcattagaccattgctctttgatcaaaacatgcaagcctaccaccagtgttttcaaaggaatcccagtggtagacttgcgggaccctgaagcaaagaccctcatagttaaggcttgtgaggaatatggcttctttaagctagtcaatcatggtgttccaatggaattcttcactagattagaagctgaagctctcaagttcttcaatctcccccagtctgacaaagacaaagccggccctcctgatccttttggctatggtgtcaagaaaattggctctaatggcgatgtgggatgggttgaatacctcctccttaacaccaatcctcaaatcacttccctcaaatccctcactgttttccgagaaacccctgaaatttttcgctctgcggtgaacgactatatccaagcagtgaagagaatgacatttgaagtggtggaattaatggcggatggtctgaaaatagagccgagggatgcgttgagtaggctattgagagacgagaagagtgactcgtgtttcaggctaaaccactatccaccatgcccggagctacaagcattgggtggtagaaacctgatagggttcggggagcatacagacccgcagataatatctgtcctaagatcaaacaacacatctggcctgcaaatctgtctcagagataagacttgggtttcagtcccacctgatcagacctccttttttatcaatgttggtgatgccttgcaggtaatgacaaatgggagattaagaagtgtgaggcacagagtgttggcagaatcaatgagatcaagggtatcaatgatctattttggagggccacctttaagtgaaaagatagtacccttagcttcattaatggcgaaaggagaagagagcttgtacgaggagttcacatggtgggaatacaagacttctgcatacaaatcaaggttgggtgattataggctaggcctctttgagaaaaaaactggtggtgctgcaggccaatga

SEQ ID NO: 188 - protein, 339 aa, Gossypium hirsutum
MVVHSQSAALDHCSLIKTCKPTTSVFKGIPVVDLRDPEAKTLIVKACEEYGFFKLVNHGVPMEFFTRLEAEALKFFNLPQSDKDKAGPPDPFGYGVKKIGSNGDVGWVEYLLLNTNPQITSLKSLTVFRETPEIFRSAVNDYIQAVKRMTFEVVELMADGLKIEPRDALSRLLRDEKSDSCFRLNHYPPCPELQALGGRNLIGFGEHTDPQIISVLRSNNTSGLQICLRDKTWVSVPPDQTSFFINVGDALQVMTNGRLRSVRHRVLAESMRSRVSMIYFGGPPLSEKIVPLASLMAKGEESLYEEFTWWEYKTSAYKSRLGDYRLGLFEKKTGGAAGQ

SEQ ID NO: 189 - DNA, 996 bp, Gossypium hirsutum
atggtggtggtgtcaaaaccagcaattgaacagttctcttcttacctgaaaaacaacaaaccaaccacattgttcactcaaatcccacttgtagacctctcaaaacctgattcaaaacaccaaataatcaaagcctgtgaagagtttgggttcttcaaggtgatcaaccatggggttccaatggaatccatttccatgttggaatccgaagctaccaagttcttcagtttaccactttgtgagaaacaaaaaacaggacaacctcaaccttatggttatggtcataaaaggattggtatgcacggtgatgttggttgggttgagtatcttcttttgactactaatcaagaccccagtctccatagcttccaaactttcagggtggctttgaatagctatatgaaatcagtaaagaaaatggcatgtgagatacttgaaatgatggctgatgggttgaagatacaacccaggaatgtgctgagcaaactgttgatggatgaagagagtgactctgttttcagggtgaatcattacccaccatgccctaatgttcaacctttgaatggtaatggcaatggcaatggggatgtgattggatttggtgaacacactgacccacaaattatctcagtgttgagatctaacaacacttctggtcttcaaatctctctaagagaaggaagctggatttcagtgccacctgaccaaacctcattcttcatcaatgttggtgactccttacaggtaatgaccaatggaaggtttaaaagtgtaaaacatagggtagtgaccaacagtgtgaaatcaaggctatcaatgatttatttttgtggaccaccattgagtgagaaaatagcacctttgccatctttgatgagaggtgatcaacaaagcttatataaagaatttacttggttcgagtacaaaaaatctgcttataattccagattggcagataataggctcattcactttgaaaaaattgctgcttcttaa

SEQ ID NO: 190 - protein, 331 aa, Gossypium hirsutum
MVVVSKPAIEQFSSYLKNNKPTTLFTQIPLVDLSKPDSKHQIIKACEEFGFFKVINHGVPMESISMLESEATKFFSLPLCEKQKTGQPQPYGYGHKRIGMHGDVGWVEYLLLTTNQDPSLHSFQTFRVALNSYMKSVKKMACEILEMMADGLKIQPRNVLSKLLMDEESDSVFRVNHYPPCPNVQPLNGNGNGNGDVIGFGEHTDPQIISVLRSNNTSGLQISLREGSWISVPPDQTSFFINVGDSLQVMTNGRFKSVKHRVVTNSVKSRLSMIYFCGPPLSEKIAPLPSLMRGDQQSLYKEFTWFEYKKSAYNSRLADNRLIHFEKIAAS

SEQ ID NO: 191 - DNA, 1164 bp, Gossypium hirsutum
atgcacttcgctatctgctcttcccatttttcgtatttaaataccaccaatttcccccccttcattacccttctcttcaatctgtctctgtttcccttattttcctctgctttctttcctcctttcaaaagaaaagaagaaaccatggttgtgcattcacagtctgcagcattagaccattgctctttgatcaaaacatgcaagcctaccaccagtgttttcaaaggaatccctgtggtagacttgagggaccctgaagcaaagaacctcatagttaaggcttgtgaggaatatggcttctttaagctagtcaatcatggtgttccaatggaattcttcaccagattagaagctgaagctctcaagttcttcaatctcccccagtctgacaaagacaaagccggccttcctgatccttttggctatggtttcaagaaaattggctctaatggcgatgtgggatgggttgaatacctcctccttaacaccaatcctcaaatcacttccctcaaatccctcactgttttccgagaaacccctgaaatttttcgctctgctgtgaacgactatatccaagcagtgaagagaatgacatttgaagtggtggaattactggcggatggtctgaaaatagagccgagggatgcgttaagtaggctattgagagacgagaagagtgactcgtgtttcaggctaaaccactatccaccatgcccggagctacaagcattgggtggtagaaacctgatagggttcggggagcatacagacccgcaaataatatctgtcctaagatcaaacaacacatctggcctgcaaatctgtctcagagataagacttgggtttcagtcccacctgatcagacctccttttttatcaatgttggtgatgccttgcaggtaatgacaaatgggagattaagaagtgtgaggcacagagtgttggcagaatcaatgagatcaagggtatcaatgatctattttggagggccacctttaagtgaaaagatagcacctttagcttcattaatggcgaaaggagaagagagcttgtacgaggagttcacatggtgggaatacaagacttctgcatacaaatcaaggttgggtgattataggctaggcctctttgagaaaaaaactggtggtgctgcaggccaatga

SEQ ID NO: 192 - protein, 387 aa, Gossypium hirsutum
MHFAICSSHFSYLNTTNFPPFITLLFNLSLFPLFSSAFFPPFKRKEETMVVHSQSAALDHCSLIKTCKPTTSVFKGIPVVDLRDPEAKNLIVKACEEYGFFKLVNHGVPMEFFTRLEAEALKFFNLPQSDKDKAGLPDPFGYGFKKIGSNGDVGWVEYLLLNTNPQITSLKSLTVFRETPEIFRSAVNDYIQAVKRMTFEVVELLADGLKIEPRDALSRLLRDEKSDSCFRLNHYPPCPELQALGGRNLIGFGEHTDPQIISVLRSNNTSGLQICLRDKTWVSVPPDQTSFFINVGDALQVMTNGRLRSVRHRVLAESMRSRVSMIYFGGPPLSEKIAPLASLMAKGEESLYEEFTWWEYKTSAYKSRLGDYRLGLFEKKTGGAAGQ

SEQ ID NO: 193 - DNA, 1035 bp, Gossypium hirsutum; identical to SEQ ID NO: 179

SEQ ID NO: 194 - protein, 344 aa, Gossypium hirsutum; identical to SEQ ID NO: 180

SEQ ID NO: 195 - DNA, 996 bp, Gossypium hirsutum
atggtggtggtgtcaaaaccagcaattgaacagttctcttcttacctgaaaaacaacaaaccaaccacattgttcactcaaatcccacttgtagacctctcaaaacctgattcaaaacaccaaataatcaaagcttgtgaagagtttgggttcttcaaggtgatcaaccatggggttccaatggaatccatttccgtgttggaatccgaagctaccaagttcttcagtttaccactttgtgagaaacaaaaaacaggacaaactcaaccttatggctatggtcataaaaggattggtacacaaggtgatgttggttgggttgagtatcttcttttgactactaatcaagaccccagtctccatagcttccaaactttgagggtggctttgaataattatatgaaatcagtaaagaaaatggcgtgtgagatacttgaaatgatggctgatgggttgaagatacaacccaggaatgtgttgagcaagctgttgatggatgaagagagtgactctgttttcagggtgaatcattacccaccatgccctaatgttcaacctttgagtggtaatggcaatggcaatggggatgtgattggatttggtgaacacactgatccacaaattatctcagtgttgagatctaacaacacttctggtcttcaaatctctctaagagaaggaagctggatttcagtgccacctgaccaaacctcattcttcatcaatgttggtgactccttacaggtaatgaccaatggaaggtttaaaagtgtaaaacatagggtagtgaccaacagtgtgaaatcaaggctatcaatgatttattttggtggaccaccattgagtgagaaaatagcacctttgccatctttgatgagaggtgatcaacaaagcttatataaagaatttacttggttcgagtacaagaaatctgcttataattccagattggcagataataggctcattcactttgaaaaaattgctgcttcttaa

SEQ ID NO: 196 - protein, 331 aa, Gossypium hirsutum
MVVVSKPAIEQFSSYLKNNKPTTLFTQIPLVDLSKPDSKHQIIKACEEFGFFKVINHGVPMESISVLESEATKFFSLPLCEKQKTGQTQPYGYGHKRIGTQGDVGWVEYLLLTTNQDPSLHSFQTLRVALNNYMKSVKKMACEILEMMADGLKIQPRNVLSKLLMDEESDSVFRVNHYPPCPNVQPLSGNGNGNGDVIGFGEHTDPQIISVLRSNNTSGLQISLREGSWISVPPDQTSFFINVGDSLQVMTNGRFKSVKHRVVTNSVKSRLSMIYFGGPPLSEKIAPLPSLMRGDQQSLYKEFTWFEYKKSAYNSRLADNRLIHFEKIAAS

SEQ ID NO: 197 - DNA, 1077 bp, Gossypium hirsutum; identical to SEQ ID NO: 181

SEQ ID NO: 198 - protein, 358 aa, Gossypium hirsutum; identical to SEQ ID NO: 182

SEQ ID NO: 199 - DNA, 999 bp, Gossypium hirsutum
atggtgatactgtcaaaaccagcaattgaacagtttagttgtatcagaaacaagcaggcagctacattgttccctcctcttatccctcttgtggacctctccaaaccagattccaggcagcagatcatcaaagcctgtgaagaatttgggttcttcaaggtcatcaaccatggggttcccatggacttcatttcccggctagaatctgaagccaccaagttcttctctttacccctttctgagaaagagaaaacaggacaacccaagccttatggctatggtaataaaaggattggaccaaatggtgatgttggttgggtggaatatcttctcctcacaaccaaccaagacccgaatctccttggaactgaaaacccagagagtttcaggattgctttggataattatatggcagcagtgaagaaaatggcatgtgagatacttgaaatgatagctgatgggctaaagattcagccaagaaatgtgttgagtaagctgatgatggatgaacagagtgactctgttttcaggctgaaccattaccctccatgcccagaggtggttcagtccttgaatggaacgagcagtaatgtgattggattcggtgaacacactgacccacaaatcatttcggtcctaagatccaacaacacttccggccttcaaatctctcttagagatggcacttggatttcagtcccaccagaccaatactcttttttcatcaatgttggtgattccttacaggtgatgacaaatggaaggtttaaaagtgtgaagcatagggtactggccaacagtgtgaaatcaaggctttcaatgatttatttttgtggaccacctttgagtgagaaaatagctccattgccatctttgatgagaggggatcaacaaagcttgtacaaagaatttacatggtttgagtacaaaaaatctgcttacagttctagattggcagataacaggctcatgcacttcgaaaaaatagttgcctcataa

SEQ ID NO: 200 - protein, 332 aa, Gossypium hirsutum
MVILSKPAIEQFSCIRNKQAATLFPPLIPLVDLSKPDSRQQIIKACEEFGFFKVINHGVPMDFISRLESEATKFFSLPLSEKEKTGQPKPYGYGNKRIGPNGDVGWVEYLLLTTNQDPNLLGTENPESFRIALDNYMAAVKKMACEILEMIADGLKIQPRNVLSKLMMDEQSDSVFRLNHYPPCPEVVQSLNGTSSNVIGFGEHTDPQIISVLRSNNTSGLQISLRDGTWISVPPDQYSFFINVGDSLQVMTNGRFKSVKHRVLANSVKSRLSMIYFCGPPLSEKIAPLPSLMRGDQQSLYKEFTWFEYKKSAYSSRLADNRLMHFEKIVAS

SEQ ID NO: 201 - DNA, 999 bp, Gossypium hirsutum
atggtgatactgtcaaaaccagcaattgaacagtttggttgtatcagaaacaagcaggcagctacattgttccctccgcttatccctcttgtggacctctccaaaccagattccaggcagcagatcatcaaagcctgcgaagaatttgggttcttcaaggtgatcaaccatggtgttcccatggacttcatttcccggctggaatctgaagccaccaagttcttctctttacccctttcggagaaagagaaaacaggacaaccccagccttatggctatggtaataaaaggattggaccaaatggtgatgttggttgggtggaatatcttctcctcacaaccaaccaagacccgaatctccttggaactgaaaacccagagagtttcaggattgctttggataattatatggcagcagtgaagaaaatggcatgtgagatacttgaaatgatagctgatgggctaaaggttcagccaagaaatgtgttaagtaagctgatgatggatgaacagagtgactctgttttcaggctgaaccattaccctccgtgcccagaggtggttcagtccttgaatggaacgagcagtaatgtgattggattcggtgaacacactgacccacaaatcatttcagtcctaagatccaacaacacttccggccttcaaatctctcttagagatggcacttggatttcagtcccaccagaccaatactcttttttcatcaatgttggtgattccttacaggtgatgacaaatggaaggtttaaaagtgtgaagcacagggtactggccaacagtgtgaaatcaaggctttcaatgatttatttttgtggaccacctttgagtgagaaaatagctccattgccatctttgatgagaggggatcaacaaagcttgtacaaagaatttacatggtttgagtacaaaaaatctgcttacagttctagattggcagataacaggctcatgcacttcgaaaaaatagttgcctcataa

SEQ ID NO: 202 - protein, 332 aa, Gossypium hirsutum
MVILSKPAIEQFGCIRNKQAATLFPPLIPLVDLSKPDSRQQIIKACEEFGFFKVINHGVPMDFISRLESEATKFFSLPLSEKEKTGQPQPYGYGNKRIGPNGDVGWVEYLLLTTNQDPNLLGTENPESFRIALDNYMAAVKKMACEILEMIADGLKVQPRNVLSKLMMDEQSDSVFRLNHYPPCPEVVQSLNGTSSNVIGFGEHTDPQIISVLRSNNTSGLQISLRDGTWISVPPDQYSFFINVGDSLQVMTNGRFKSVKHRVLANSVKSRLSMIYFCGPPLSEKIAPLPSLMRGDQQSLYKEFTWFEYKKSAYSSRLADNRLMHFEKIVAS

SEQ ID NO: 203 - DNA, 984 bp, Gossypium hirsutum
atggttgtgttgtcacagccaccagcattagagcattgttccttgatcaaaacatgcaagcctacatgtgttttctcagggattccggtgattgaactaagggacccggaagcaaagaccctcatagtcaaggcctgtgaagagtatggcttcttcaaactgatcaatcatggtgttccaatggaattcatgaccagattggaagctgaagctcttagcttctttaacctcccccagtccgacaaggacaaagctaccccttttggctatggcagcaacaaaattggaccaaatggtgacgtgggatggattgaatatctccttgtcaataccaatcctcaactcacctccctcaaaactctttcagaaaatttctgctatgcagtgaatgactatattctagcagtgaagagattggcatttgaagtagtggaaataatggccgatggcctggaaattgagccaaggaatgtgttgagtaggttattaagagatgagaagagtgactcgtgtttcaggctaaaccactatccaccatgcccacagctacaggcattgagtggtagaaatttaattgggtttggggaacatacagacccacagataatttctatcctaagatccaacaacacatcaggcctgcaaatatgtctgagagataggacttgggtttcagtccctcctgatcaaacctcctttttcatcagtgttggtgatgccttgcaggtaatgagtaatgggaggctaagaagtgtaaggcatagggtgttaacagactcaatgaaatcaagggtttcaatgatctattttggagggccacctatgagtgaaaagatagtggctttaccttgtctaatggcaaagggagaagagagcttgtacaaggaattcacatggtgggaatacaaaacttgtgcatacaattcaaggttgggtgctaataggcttgggctgtttgagaaaactgctaatgcaagcctatga

SEQ ID NO: 204 - protein, 327 aa, Gossypium hirsutum
MVVLSQPPALEHCSLIKTCKPTCVFSGIPVIELRDPEAKTLIVKACEEYGFFKLINHGVPMEFMTRLEAEALSFFNLPQSDKDKATPFGYGSNKIGPNGDVGWIEYLLVNTNPQLTSLKTLSENFCYAVNDYILAVKRLAFEVVEIMADGLEIEPRNVLSRLLRDEKSDSCFRLNHYPPCPQLQALSGRNLIGFGEHTDPQIISILRSNNTSGLQICLRDRTWVSVPPDQTSFFISVGDALQVMSNGRLRSVRHRVLTDSMKSRVSMIYFGGPPMSEKIVALPCLMAKGEESLYKEFTWWEYKTCAYNSRLGANRLGLFEKTANASL

SEQ ID NO: 205 - DNA, 996 bp, Gossypium hirsutum; identical to SEQ ID NO: 189

SEQ ID NO: 206 - protein, 331 aa, Gossypium hirsutum; identical to SEQ ID NO: 190

SEQ ID NO: 207 - DNA, 1020 bp, Gossypium hirsutum
atggtggttcaatccaatctttcgacgttgaaccattgttcatcgatcgaaacacgtaaacccgccaccgttctcgactccataccgtcgataaacttgaaagacctcgaatcgaaaactcacataatgaaagcttgtgaagaatatgggttcttcaaggtggtgaatcacagtgttccaatggagtttatagctaaattggaagctcaagctttggagttttttaatcttcctcaatccgaaaaagataaagctggtccaccagatccttttggttatggtagcaaaaggattggaagcaatggtgatgttggttggattgaatatcttcttctcaataccaatcctcaagtcacttctcttaaaaccctcactgttttccgggaaaccccagaaattttctggtcagctgtaaaggagtatattgaagcagtgaagctaatggcatgtgaagtattggaactaatagcagatggtctgaaaattgaaccaagggatacattgagcaagctgttaaaggatgagaatagtgattcatgctttaggctaaaccattatccaccatgccctgaattacaggcattgagtggcagagatttggttgggtttggggaacacactgaccctcaaataatctctgtcttaagatccaacagcacatctggtttgcaaatttgtctgaaagatggggtttgggtttctgtcccacctgatgaaacttcctttttcatcaacgttggtgatgctttgcaggtgatgacaaatgggaggttcaaaagtgtgaggcatagagtattggcaaattcacacaaatcaagggtttcaatgatatattttggaggaccacctttaagtgaaaagatagtacctttaacttcactaatgggaaaacaagaagaaagcttatacaaagagttcacatggtgggaatacaagacttcagcatataagtcaaggttggctgactataggcttgggttgtttgagaaaaaaacacaccaagtgcaagccattgaatga

SEQ ID NO: 208 - protein, 339 aa, Gossypium hirsutum
MVVQSNLSTLNHCSSIETRKPATVLDSIPSINLKDLESKTHIMKACEEYGFFKVVNHSVPMEFIAKLEAQALEFFNLPQSEKDKAGPPDPFGYGSKRIGSNGDVGWIEYLLLNTNPQVTSLKTLTVFRETPEIFWSAVKEYIEAVKLMACEVLELIADGLKIEPRDTLSKLLKDENSDSCFRLNHYPPCPELQALSGRDLVGFGEHTDPQIISVLRSNSTSGLQICLKDGVWVSVPPDETSFFINVGDALQVMTNGRFKSVRHRVLANSHKSRVSMIYFGGPPLSEKIVPLTSLMGKQEESLYKEFTWWEYKTSAYKSRLADYRLGLFEKKTHQVQAIE

SEQ ID NO: 209 - DNA, 744 bp, Brassica napus
atggtggttctatcacagcacgttgctttagataaccacttatccgtaatcccaacatacaaaccggttccggtccccgtcgtggacctaaccgacccagaagccaaaactctaatcgtgaaagcctgtgaagagtttggtttcttcaaggttgtaaaccacggagtccgaccagacctcatgacccggttagagcaggaggctgtcggcttcttcgccttgccacagtctcttaaaaaccaggccggtccgcctgaaccctacggttatggtagtaaacggattggaccaaacggggacgtgggatggatagagtatatcctcctcaatgctaaccctcagctcacgtctcccaaaacctccgccattttccgtcaaaccccacaaattttccgagaggcggtggaggagtacatgaaggaggtgaagaaagtcacgtgcaaagtgttggagatggtgacggaaggattaggaatagagccaagggacacactgagtaagatggtgagagatgagaagagtgactcttgcttgagaatgaaccattatcctacggcggaggaagaggtggagaagatggtgaaagtagggtttggggaacacacagacccacaaatcatctcagtgctacggtccaataacactgcgggtcttcaaatctgtatgaaagatggaagttgggtcgctgtccctcctgatcactcttctttcttcatcaatgttggagatgctcttcagatttga

SEQ ID NO: 210 - protein, 247 aa, Brassica napus
MVVLSQHVALDNHLSVIPTYKPVPVPVVDLTDPEAKTLIVKACEEFGFFKVVNHGVRPDLMTRLEQEAVGFFALPQSLKNQAGPPEPYGYGSKRIGPNGDVGWIEYILLNANPQLTSPKTSAIFRQTPQIFREAVEEYMKEVKKVTCKVLEMVTEGLGIEPRDTLSKMVRDEKSDSCLRMNHYPTAEEEVEKMVKVGFGEHTDPQIISVLRSNNTAGLQICMKDGSWVAVPPDHSSFFINVGDALQI

SEQ ID NO: 211 - DNA, 744 bp, Brassica napus
atggtggttttatcacagcacgttgctttagataaccacttatccgtaatcccaacatacaaaccggttccggtccccgtcgtggacctaaccgacccagaagccaaaactctaatcgtgaaagcctgtgaagagtttggtttcttcaaggttgtaaaccacggagtccgaccagacctcatgacccggttagagcaggaggctgtcggcttcttcgccttgccacagtctcttaaaaaccaggccggtccgcctgaaccgtacggttatggtagtaaacggattggaccaaacggggacgtgggatggatagagtatattctcctcaatgctaatcctcagctcacgtctcccaaaacctccgccattttccgtcaaaccccacaaattttccgagaggcggtggaggagtacatgaaggaggtgaagaaagtcacgtgcaaagtgttggagatggtgacggaaggattagggatagagccaagggacacactgagtaagatggtgagagatgagaagagcgactcttgcttgagaatgaaccattatcctacggcggaggaagaggtggagaagatggtgaaagtaggatttggggaacacacagacccacaaatcatctcagtgctacggtccaataacactgcgggtcttcaaatctgtatgaaagatggaagttgggtcgctgtccctcctgatcactcttctttcttcatcaatgttggagatgctcttcagatttga

SEQ ID NO: 212 - protein, 247 aa, Brassica napus; identical to SEQ ID NO: 210

SEQ ID NO: 213 - DNA, 792 bp, Brassica napus
atggtggttttatcacagccagtcgccttagacaaccacatatccgtaatcccaacgtacaccccggttccggtcttcacttcccaaccaatccccgtcgtggacctaaccgacccagaagccaaaaccctaatcgtgaaagcttgtgaggagtttggttttttcaaggttgtaaaccacggagtccgagatgacctcatgacccggttagagcaggaggctatccgctttttcgccttgccccagtctcttaagaaccaggccggtccacctgaaccgtacggatatggtagtaaacggattggaccaaacggtgacgttgggtggattgagtatatcctcctcaatgctaaccctcagctctccaccccaaatacatctgacgttttcggtcaaaccccacagatttttcgagaggcggtggacgagtacatgcacgagttgaaggaagtgtcgtgcaaggttttggagatggtgacggaaggattagggatagagccaagggacacactgagtaagatggtgagagatgagaagagtgactcttgcttgagactgaaccattatccgacggcggaggaagaggcggagaacatggtgaaagtagggtttggggaacacacagacccacaaataatctcagtgctaaggtccaatgacacggcgggtcttcaaatatgtatgaaagatggaagttgggtcgctgtccctcctgatcactcctcttttttcattaatgttggagatgctcttcagtttactggtggtctaaactcaaaagtattttcttaa

SEQ ID NO: 214 - protein, 263 aa, Brassica napus
MVVLSQPVALDNHISVIPTYTPVPVFTSQPIPVVDLTDPEAKTLIVKACEEFGFFKVVNHGVRDDLMTRLEQEAIRFFALPQSLKNQAGPPEPYGYGSKRIGPNGDVGWIEYILLNANPQLSTPNTSDVFGQTPQIFREAVDEYMHELKEVSCKVLEMVTEGLGIEPRDTLSKMVRDEKSDSCLRLNHYPTAEEEAENMVKVGFGEHTDPQIISVLRSNDTAGLQICMKDGSWVAVPPDHSSFFINVGDALQFTGGLNSKVFS

SEQ ID NO: 215 - DNA, 795 bp, Brassica napus
atggtggttttatcacagccagtcgccttagacaaccacatatccgtaatcccaacgtacaccccggttccggtcttcacttcccaaccaatccccgtcgtggacctaaccgacccagaagccaaaaccctaatcgtgaaagcttgtgaggagtttggttttttcaaggttgtaaaccacggagtccgagctgacctcatgacccggttagagcaggaggctatccgcttcttcgccttgccccagtctcttaagaaccaggccggtccacctgaaccgtacggatatggtagtaaacggattggaccaaacggtgacgttgggtggattgagtatatcctcctcaatgctaaccctcagctctccacccctaaaacatccgacgttttcggtcaaaccccacaaatttttcgagaggcggtggacgagtacatgcacgagttgaaggaagtgtcgtgcaaggttttggggatggtgacggaaggattagggatagagccaagggacacactgagtaagatggtgagagatgagaagagtgactcttgcttgagactgaaccattatccgacggcggaggaagaggcggagaacatggtgaaagtagggtttggggaacacacagacccacaaataatctcagtgctaaggtccaatgacacggcgggtcttcaaatatgtatgaaagatggaagttgttgggttgctgtccctcctgatcactcctcttttttcattattgttggagatgctcttcagtttactggtggtctaaactcaaaagtattttcttaa

SEQ ID NO: 216 - protein, 264 aa, Brassica napus
MVVLSQPVALDNHISVIPTYTPVPVFTSQPIPVVDLTDPEAKTLIVKACEEFGFFKVVNHGVRADLMTRLEQEAIRFFALPQSLKNQAGPPEPYGYGSKRIGPNGDVGWIEYILLNANPQLSTPKTSDVFGQTPQIFREAVDEYMHELKEVSCKVLGMVTEGLGIEPRDTLSKMVRDEKSDSCLRLNHYPTAEEEAENMVKVGFGEHTDPQIISVLRSNDTAGLQICMKDGSCWVAVPPDHSSFFIIVGDALQFTGGLNSKVFS

SEQ ID NO: 217 - DNA, 753 bp, Brassica napus
atggtgaaagggtcccagaaaatcgtggccgcagataaaggcataccaataatagacatgtcgcaggagagatcacgagtgtcgatgcagatagtcaaagcctgcgagactctcggctttttcaaggtggtcaaccacggctttgaccgaaccatcatctcaaggatggagcaagagtccattaacttcttcgctaaatcggttcacgaaaagaaatcggttgaatcggttaaccagccatttcgttatggctttagggacatcggtctcaacggtgactctggtgaggtcgagtacttgctgtttcataccaacgaccccgcttttcgctctaagccatccttccgagtctcagtctgtctcagtattcactcggcagtgaattgttacatagaagcagttaggcagttggctcatgagatattagaactgacggctgagggacttggggtcccacctcacaccttcagtaggttgatcagctccgtcgatagtgactccattttgagggtgaatcactatccaccgtccgatcagtttttcggtggagccacacactctgataaatctgtgtcactgaccagggttggcttcggagaacacaccgacccgcagatcttaacagttcttcgatctaacggtgtaggaggcctccaagtgtccaacccagacggcatgtgggtccctgtcttccctgacccctcagctttctgcgtcaatgtaggagacttgttgcaggtcggtgtcttttaa

SEQ ID NO: 218 - protein, 250 aa, Brassica napus
MVKGSQKIVAADKGIPIIDMSQERSRVSMQIVKACETLGFFKVVNHGFDRTIISRMEQESINFFAKSVHEKKSVESVNQPFRYGFRDIGLNGDSGEVEYLLFHTNDPAFRSKPSFRVSVCLSIHSAVNCYIEAVRQLAHEILELTAEGLGVPPHTFSRLISSVDSDSILRVNHYPPSDQFFGGATHSDKSVSLTRVGFGEHTDPQILTVLRSNGVGGLQVSNPDGMWVPVFPDPSAFCVNVGDLLQVGVF

SEQ ID NO: 219 - DNA, 885 bp, Brassica napus
atggtggttttatcacggccagtcgctttagataatcacatatcagtaatcccagcatacaagccagctccggttctcacatcccattcaatccccgtcgtggacctaacccacccagaagccaaaacccttatcgtgaaagcttgtgaggagtttggtttcttcaaggttgtcaaccacggagtgtgccctgacctcatgacccggttagagcaggaagctgtcggcttcttcgccttgcctcagtctctcaaaaaccaggccggtccacctgaaccgtacggttatggtagtaaacggattggaccaaacggtgacgtggggtggattgagtatatcctcctcaatgctaaccctgagctctcgtcacccaaaacctctgccgttttcagtcaaagcccactaattttccgagtttcagcgatattcaatgtttctagaaacaagtgcgaaagtgacaaatcattggaccaccgaaaagatttcaagactgagttacctgaggcagtggaggaatacatgaaagaggtgaaggaagtgtcgtgcaaagtgttggagatgataactgaaggattggggatagagccaagggacagtctgagtaagatggtgagagatgagaagagtgactcgtgcctgagactgaaccactatccgacggcggaggaagaggcggagaagatggtgaagttagggtttggggaacacacagacccacagatcatctcagtgctaaggtccaataacgcagcgggtcttcaaatctgtatgaaagatggaagctgggtcgctgtccctcctgatcactcttctttcttcattaatgttggagatgctcttcagtttaaccgggctggtcaaaactcattaaagtattttcagtag

SEQ ID NO: 220 - protein, 294 aa, Brassica napus
MVVLSRPVALDNHISVIPAYKPAPVLTSHSIPVVDLTHPEAKTLIVKACEEFGFFKVVNHGVCPDLMTRLEQEAVGFFALPQSLKNQAGPPEPYGYGSKRIGPNGDVGWIEYILLNANPELSSPKTSAVFSQSPLIFRVSAIFNVSRNKCESDKSLDHRKDFKTELPEAVEEYMKEVKEVSCKVLEMITEGLGIEPRDSLSKMVRDEKSDSCLRLNHYPTAEEEAEKMVKLGFGEHTDPQIISVLRSNNAAGLQICMKDGSWVAVPPDHSSFFINVGDALQFNRAGQNSLKYFQ

SEQ ID NO: 221 - DNA, 702 bp, Brassica napus
atggtggttttatcacagccagtcgctttagataatcacatatcagtaatcccaacatacaagccagttccggttctaacatcccattcaatccccgtcgtggacctaacccacccagaagccaaaacccttatcgtgaaagcttgtgaggagtttggtttcttcaaggttgtcaaccacggagtgtgccctgacctcatgacccggttagagcaggaagctgtcggcttcttcgccttgcctcagtctctcaaaaaccaggccggtccacctgaaccgtacggctatggtagtaaacggattggaccaaacggtgacgtggggtggattgagtatatcctcctcaatgctaaccctcagctctcgtcagccaaaacctctgccgttttcagtcaaagcccactaattttccgtgaggcagtggaggaatacatgaaagaggtgaaggaagtgtcgtgcaaagtgttggagatgataactgaaggattggggatagagccaagggacagtctgagtaagatggtgagagatgagaagagtgactcgtgcctgagactgaaccactatccgacggcggaggaagaggcggagaagatggtgaagttagatggaagctgggtcgctgtccctcctgatcactcatctttcttcattaatgttggagatgctcttcagtttaactgggctggtcaaaactcataa

SEQ ID NO: 222 - protein, 233 aa, Brassica napus
MVVLSQPVALDNHISVIPTYKPVPVLTSHSIPVVDLTHPEAKTLIVKACEEFGFFKVVNHGVCPDLMTRLEQEAVGFFALPQSLKNQAGPPEPYGYGSKRIGPNGDVGWIEYILLNANPQLSSAKTSAVFSQSPLIFREAVEEYMKEVKEVSCKVLEMITEGLGIEPRDSLSKMVRDEKSDSCLRLNHYPTAEEEAEKMVKLDGSWVAVPPDHSSFFINVGDALQFNWAGQNS

SEQ ID NO: 223 - DNA, 555 bp, Brassica napus
atggagaaatttgcttcggaatcggaggctctagcttatactttggcagaggttcttgcagagaaatcaggaagaaaatcaaatttctttaaagaaaaatgtgttagaaacacatgttatctaaggatgaaccgttatccaccttgtccaaaaccatcagaggtgtacggtttaatgcctcacacggacagtgatttcctcacaatcttgtatcaagaccaagtcggaggactccaactcattaaagacaatagatggatcgccgttaaacctaaccctcgtgctctcattatcaatatcggtgacttatttcaggcatggagcaatggcatgtacaaaagtgtggagcatcgtgtgatgacgaatccaacggtggagagattctcaacggcgtattttctgtgtccatcatacgacgccgttatagagtgttcaggtgattgtcctacttatagaaatttcagcttcagagaattcagacaacaagttcaagaagatgttaagaagcttggttataaagttggcctccctaggttcgttaatcatctttactga

SEQ ID NO: 224 - protein, 184 aa, Brassica napus
MEKFASESEALAYTLAEVLAEKSGRKSNFFKEKCVRNTCYLRMNRYPPCPKPSEVYGLMPHTDSDFLTILYQDQVGGLQLIKDNRWIAVKPNPRALIINIGDLFQAWSNGMYKSVEHRVMTNPTVERFSTAYFLCPSYDAVIECSGDCPTYRNFSFREFRQQVQEDVKKLGYKVGLPRFVNHLY

SEQ ID NO: 225 - DNA, 639 bp, Brassica napus
atggttgtttcgttaaagccaaaaccagtcactcttaataatagccaaatctattttaacccaaaatgcaaaacgagtccggttctagtcccggttgtaaatttaaccgacccaaatgccaaaacccaaatcgtaaaggcttgcgaggagttcggattcttcaaagtcgtcaaccatggggtcagaccagagtttttgacccagttggaagaagaggccatcaaattctttgctttgccacagtctcataaagacaaggcgggtccatccgacccgtttgggtacggtagtaaacggatcggacctaatggtgatgtaggctggattgagtatattctcctcaatgctaatagtgataccaaaaccatcgccgtgttccggcaaaccacgccaactttcagagaggtggtggaagtgtacatggaggagatgaaggacatgtctagcaaagttcttgagatggtagctgaagaattaaagatagagccaaaggagaagctaagcaaactggtgaaggtgaaggagagtgattcgtgtctgaggatgaaccattacccggagaaggaggagactcgagacaaggaagaggttgggttcggtgagcatacagatccacagttagtgtcagtgcttaggtag

SEQ ID NO: 226 - protein, 212 aa, Brassica napus
MVVSLKPKPVTLNNSQIYFNPKCKTSPVLVPVVNLTDPNAKTQIVKACEEFGFFKVVNHGVRPEFLTQLEEEAIKFFALPQSHKDKAGPSDPFGYGSKRIGPNGDVGWIEYILLNANSDTKTIAVFRQTTPTFREVVEVYMEEMKDMSSKVLEMVAEELKIEPKEKLSKLVKVKESDSCLRMNHYPEKEETRDKEEVGFGEHTDPQLVSVLR

SEQ ID NO: 227 - DNA, 558 bp, Brassica napus
atggcagtcttgtctaaaccagcagcagaaccaaaatttgggttttctccaatcccggttatagatatctctgacccagaatccaaacaggccatcgtcaaagcctgtgaagactttgggttcttcaaggtgatcaaccatggcgtttcctctgaactagtctctgttttggaacaagaggccgtcaagttcttctcattgcccaagtccgagaaaacccaactcgcaggttatccgtttggatatgggagcagagagattggtcggaatggtgacgtgggttgggttgagtacttgctgatgaacgctaatcttgactttggttcggttccattcccaggaatcttcagaaacgcattgtcagagtacacaacatcagtaaggaaaatgacatgccatgttttggagatgattactgatgggttagggatcaaacagagggacacacttagcaagcttgtgtgtgattcaaacactgattcgatgttcagacttaatcactatccaccatgccctcttatcaacaaaaacaccaatggtggcaagaattcttactga

SEQ ID NO: 228 - protein, 185 aa, Brassica napus
MAVLSKPAAEPKFGFSPIPVIDISDPESKQAIVKACEDFGFFKVINHGVSSELVSVLEQEAVKFFSLPKSEKTQLAGYPFGYGSREIGRNGDVGWVEYLLMNANLDFGSVPFPGIFRNALSEYTTSVRKMTCHVLEMITDGLGIKQRDTLSKLVCDSNTDSMFRLNHYPPCPLINKNTNGGKNSY

SEQ ID NO: 229 - DNA, 648 bp, Brassica napus
atggttgtttcgttaaagccaaagtcagtcactcttaataatagccaagtccatgttaacccaaaatgcaaaccgagtccggttctaatcccggttgtaaatttaaccgatccaaatgccaaaacccaaatcgtaaaggcttgcgaggagttggggttcttcaaagttgtcaaccatggggtcagaccagagtttttgacccagttggaagaagaggccatcaaattctttgctttgccacagtttcataaagacaaggcgggtccagccgacccgtttgggtacggtagtaaacggatcggacctaatggtgatgtaggctggattgagtatattctgctcaatgctaatagtgatactaaaaccaccgccgtgttcctgcaaaccactccaactttcagagaggtggtggtcctggtggaagtgttcatggaggagatgaaggatatgtctagcaaagttcttgatatggtagctgaagagttaaagatagagccaaaggataagctaagcaaactggtgaaggtgaaggagagtgattcgtgtctgaggatgaaccattacccggagaaggaggagactagacgcaaggaagagattgggttcggtgagcatacagatccacagttagtgtcagtgcttaggtag

SEQ ID NO: 230 - protein, 215 aa, Brassica napus
MVVSLKPKSVTLNNSQVHVNPKCKPSPVLIPVVNLTDPNAKTQIVKACEELGFFKVVNHGVRPEFLTQLEEEAIKFFALPQFHKDKAGPADPFGYGSKRIGPNGDVGWIEYILLNANSDTKTTAVFLQTTPTFREVVVLVEVFMEEMKDMSSKVLDMVAEELKIEPKDKLSKLVKVKESDSCLRMNHYPEKEETRRKEEIGFGEHTDPQLVSVLR

SEQ ID NO: 231 - DNA, 630 bp, Brassica napus
atggtagttttgttacagccagtcacatttaatagcgacgtctatgttaacccaaaatgcaaaccaagtccggtcccagtcccggttatagacttaaccgacgcagatgccaaaacccaaatcgtgaaggcttgcgaggagttggggttcttcaaagtggtcaaccacggagtacgacccgatcttttaacccagttggaggaagaggccaacaagttctttgctatgcctcagtatctcaaagaaaaagcgggtccacccgacccgtttggatacggtagtaaacggatcggacccagtggtgacatgggctggttagagtatattctcctcaatgctaatcatcatctctcgtctaccaaaaccactgccgttttccagcaaacccatgcaactttcagagaggcggtggaagagtacatggatgagatgaagcgaatggcttgcaatgttctggagatggtagaagaagagctaagtatagagccaaaggagaagctgagcaaactggtgaaggtggaagagagtgattcttgtctgagggtgaaccattacccggagaaggaagagactccggccaaggaagagattgggttcggtgagcacacggatccacagattctcggttga

SEQ ID NO: 232 - protein, 209 aa, Brassica napus
MVVLLQPVTFNSDVYVNPKCKPSPVPVPVIDLTDADAKTQIVKACEELGFFKVVNHGVRPDLLTQLEEEANKFFAMPQYLKEKAGPPDPFGYGSKRIGPSGDMGWLEYILLNANHHLSSTKTTAVFQQTHATFREAVEEYMDEMKRMACNVLEMVEEELSIEPKEKLSKLVKVEESDSCLRVNHYPEKEETPAKEEIGFGEHTDPQILG

SEQ ID NO: 233 - DNA, 624 bp, Brassica napus
atgacgatattgcctaaaccggtcgaagaaccaaaatccgggttttctccaatcccggttatagatatctctgacccagagtccaaacacgccatggtaaaagcctgtgaagactttgggttcttcaaggtgatcaaccatggagtaccctcggagctagtatctgttttggaacacgaggctgtcgagttcttctcattgcccacgtccgacaaaaaccaagtcgcaggttatccctttggatacgggaacggaaagattggtcggaatggtgacgttggttgggttgagtacttgttgatgaatgtcaatcttgatatcggttcggatccgttccttccggctctcttgaataaccgagaaactataaggaacgcagtgttggagtacacaacatcagcgaggaaaatgacatgtgatgttttggagatgattactgatgggttagggatcaaaccgaggaacacacttagcaagcttgtctctgatcaaaacagtgactcgaaattcagacttaatttttatccaccatgccctctcatcaacgaaaatatctatggtggcaacaatgtgatagatccgtcctccttcttcttcaacgtcggcgactctctccaggtttga

SEQ ID NO: 234 - protein, 207 aa, Brassica napus
MTILPKPVEEPKSGFSPIPVIDISDPESKHAMVKACEDFGFFKVINHGVPSELVSVLEHEAVEFFSLPTSDKNQVAGYPFGYGNGKIGRNGDVGWVEYLLMNVNLDIGSDPFLPALLNNRETIRNAVLEYTTSARKMTCDVLEMITDGLGIKPRNTLSKLVSDQNSDSKFRLNFYPPCPLINENIYGGNNVIDPSSFFFNVGDSLQV

SEQ ID NO: 235 - DNA, 630 bp, Brassica napus
atgactatattgcctaaactggtcgaagaactaaaatcggggttttctccaatcccggttatagatatctctgacccagagtccaaacaggccctggtaaaagcctgtgaagactttgggttcttcaaggtgatcaaccatggagtaccctcggagctagtatctgttttggaacacgaggctgtcaagttcttctcattgcccacgtcctacaaaaaccaagtcacaggttatccctttggatacgggaacggaaaaattggtcggaatggtgacgttggttgggttgagtacttgttgatgaatgtcaatcttgatatcggttcggatccgttccttccgggtctcttgaataaccgagaaactataaggaacgcagtgttggagtacacaacatcagtgaggaaaatgacatgtgatgttttggagatgattactgatgggttagggatcaaaccgaggaacacacttagcaagcttgtctctgatcaaaacagtgactcgaaattcagacttaatcattatccaccatgccctctcatccacgaaaatatcgatggtgcatgcaacaatgtgatcatagatccgtcctccttcttcttcaacgtctgcgactctctccaggtttga

SEQ ID NO: 236 - protein, 209 aa, Brassica napus
MTILPKLVEELKSGFSPIPVIDISDPESKQALVKACEDFGFFKVINHGVPSELVSVLEHEAVKFFSLPTSYKNQVTGYPFGYGNGKIGRNGDVGWVEYLLMNVNLDIGSDPFLPGLLNNRETIRNAVLEYTTSVRKMTCDVLEMITDGLGIKPRNTLSKLVSDQNSDSKFRLNHYPPCPLIHENIDGACNNVIIDPSSFFFNVCDSLQV

SEQ ID NO: 237 - DNA, 1068 bp, Brassica napus
atggttgcaagctggccagagccgattgtttccgttcaaaccttgtcccaagccggcatatccaccgtcccaaaccgctatgttaaaccggttcatcagagaccggtctacaactccgaccaatccggtcttgacatggaagtacccgtgctagacatgagagacgtgtggaggaagccggaggggctgaggcgcgtgaggaatgcgtgtgaggagtggggtttcttccaagtggtgaaccatggtgtagaccatgcgctgatggagagtgtgaggggagcgtggcgagagttctttgatttacccgtagaggtgaaacgaaagtacgcaaactcaccagacacatatgaaggctatggaagcagggttggggttgtgaaagatgctaagttagattggagtgattatttctttctcaattacttgccttcttccattagaaacccttccaagtggccatctcagcctcctaagataaggtatagagaattgatcgaagagtacggagaagaagtgagaaaactgtgtgagaggctagtggagacattgtcagagagtttaggtttagaaccaaaccatctcatgaaggcctttggaggagaagacaaagttggagctaatctgagagcaaacttttacccaaaatgccctcagccacacctaactttaggtctctcttctcattctgacccgggtggcatcaccattgtcctccccgacgaggaggtcgctggcctccaggtccgtcgtggtgactgctgggtcaccattaaatccgtgcccaatgctttgatcgttaacattggagatcaagttcagatacttagcaacggaatttacaaaagcgtggagcatcaggtggtcgttaattccggtatggatcgagtctccttggcactcttctacaacccgagaagtgatatcccgatcggaccggttaaagcactattaaccaaagaccgacctgctctttataaaccgatcaggttcgacgagtaccgccttctgattcgacaaaagggtcctagtgggaaaaaccaagttgattcactgttggcaagcacatga

SEQ ID NO: 238 - protein, 355 aa, Brassica napus
MVASWPEPIVSVQTLSQAGISTVPNRYVKPVHQRPVYNSDQSGLDMEVPVLDMRDVWRKPEGLRRVRNACEEWGFFQVVNHGVDHALMESVRGAWREFFDLPVEVKRKYANSPDTYEGYGSRVGVVKDAKLDWSDYFFLNYLPSSIRNPSKWPSQPPKIRYRELIEEYGEEVRKLCERLVETLSESLGLEPNHLMKAFGGEDKVGANLRANFYPKCPQPHLTLGLSSHSDPGGITIVLPDEEVAGLQVRRGDCWVTIKSVPNALIVNIGDQVQILSNGIYKSVEHQVVVNSGMDRVSLALFYNPRSDIPIGPVKALLTKDRPALYKPIRFDEYRLLIRQKGPSGKNQVDSLLAST

SEQ ID NO: 239 - DNA, 990 bp, Arabidopsis thaliana
atggcggtattgtctaaaccggtagcaataccaaaatccgggttctctctaatcccggttatagatatgtctgacccagaatccaaacatgccctcgtgaaagcatgcgaagacttcggcttcttcaaggtgatcaaccatggcgtttccgcagagctagtctctgttttagaacacgagaccgtcgatttcttctcgttgcccaagtcagagaaaacccaagtcgcaggttatcccttcggatacgggaacagtaagattggtcggaatggtgacgtgggttgggttgagtacttgttgatgaacgctaatcatgattccggttcgggtccactatttccaagtcttctcaaaagcccgggaactttcagaaacgcattggaagagtacacaacatcagtgagaaaaatgacattcgatgttttggagaagatcacagatgggctagggatcaaaccgaggaacacacttagcaagcttgtgtctgaccaaaacacggactcgatattgagacttaatcactatccaccatgtcctcttagcaataagaaaaccaatggtggtaagaatgtgattggttttggtgaacacacagatcctcaaatcatctctgtcttaagatctaacaacacttctggtctccaaattaatctaaatgatggctcatggatctctgtccctcccgatcacacttccttcttcttcaacgttggtgactctctccaggtgatgacaaatgggaggttcaagagcgtgaggcatagggttttagctaactgtaaaaaatctagggtttctatgatttacttcgctggaccttcattgactcagagaatcgctccgttgacatgtttgatagacaatgaggacgagaggttgtacgaggagtttacttggtctgaatacaaaaactctacctacaactctagattgtctgataataggcttcaacaattcgaaaggaagactataaaaaatctcctaaattga

SEQ ID NO: 240 - protein, 329 aa, Arabidopsis thaliana
MAVLSKPVAIPKSGFSLIPVIDMSDPESKHALVKACEDFGFFKVINHGVSAELVSVLEHETVDFFSLPKSEKTQVAGYPFGYGNSKIGRNGDVGWVEYLLMNANHDSGSGPLFPSLLKSPGTFRNALEEYTTSVRKMTFDVLEKITDGLGIKPRNTLSKLVSDQNTDSILRLNHYPPCPLSNKKTNGGKNVIGFGEHTDPQIISVLRSNNTSGLQINLNDGSWISVPPDHTSFFFNVGDSLQVMTNGRFKSVRHRVLANCKKSRVSMIYFAGPSLTQRIAPLTCLIDNEDERLYEEFTWSEYKNSTYNSRLSDNRLQQFERKTIKNLLN

SEQ ID NO: 241 - DNA, 1026 bp, Arabidopsis thaliana
atggtggttttgccacagccagtcactttagataaccacatctccctaatccccacatacaaaccggttccggttctcacttcccattcaatccccgtcgtcaacctagccgatccggaagcgaaaacccgaatcgtaaaagcctgcgaggagttcgggttcttcaaggtcgtaaaccacggagtccgacccgaactcatgactcggttagagcaggaggctattggcttcttcggcttgcctcagtctcttaaaaaccgggccggtccacctgaaccgtacggttatggtaataaacggattggaccaaacggtgacgttggttggattgagtatctcctcctcaatgctaatcctcagctctcctctcctaaaacctccgccgttttccgtcaaacccctcaaattttccgtgagtcggtggaggagtacatgaaggagattaaggaagtgtcgtacaaggtgttggagatggttgccgaagaactagggatagagccaagggacactctgagtaaaatgctgagagatgagaagagtgactcgtgcctgagactaaaccattatccggcggcggaggaagaggcggagaagatggtgaaggtggggtttggggaacacacagacccacagataatctcagtgctaagatctaataacacggcgggtcttcaaatctgtgtgaaagatggaagttgggtcgctgtccctcctgatcactcttctttcttcattaatgttggagatgctcttcaggttatgactaacgggaggttcaagagtgttaaacacagggtcttagccgatacaaggagatcgaggatttcaatgatatatttcggcggaccgccattgagccagaagatcgcaccattgccatgccttgtccctgagcaagatgattggctttacaaagaattcacttggtctcaatacaaatcttctgcttacaagtctaagcttggtgattatagacttggtctctttgagaaacaacctcttctcaatcataaaacccttgtatga

SEQ ID NO: 242 - protein, 341 aa, Arabidopsis thaliana
MVVLPQPVTLDNHISLIPTYKPVPVLTSHSIPVVNLADPEAKTRIVKACEEFGFFKVVNHGVRPELMTRLEQEAIGFFGLPQSLKNRAGPPEPYGYGNKRIGPNGDVGWIEYLLLNANPQLSSPKTSAVFRQTPQIFRESVEEYMKEIKEVSYKVLEMVAEELGIEPRDTLSKMLRDEKSDSCLRLNHYPAAEEEAEKMVKVGFGEHTDPQIISVLRSNNTAGLQICVKDGSWVAVPPDHSSFFINVGDALQVMTNGRFKSVKHRVLADTRRSRISMIYFGGPPLSQKIAPLPCLVPEQDDWLYKEFTWSQYKSSAYKSKLGDYRLGLFEKQPLLNHKTLV

SEQ ID NO: 243 - DNA, 1008 bp, Arabidopsis thaliana
atggtaattgtgttacagccagccagttttgatagcaacctctatgttaatccaaaatgcaaaccgcgtccggttttaatccctgttatagacttaaccgactcagatgccaaaacccaaatcgtcaaggcatgtgaagagtttgggttcttcaaagtcatcaaccatggggtccgacccgatcttttgactcagttggagcaagaagccatcaacttctttgctttgcatcactctctcaaagacaaagcgggtccacctgacccgtttggttacggtactaaaaggattggacccaatggtgaccttggctggcttgagtacattctccttaatgctaatctttgccttgagtctcacaaaaccaccgccattttccggcacacccctgcaattttcagagaggcagtggaagagtacattaaagagatgaagagaatgtcgagcaaatttctggaaatggtagaggaagagctaaagatagagccaaaggagaagctgagccgtttggtgaaagtgaaagaaagtgattcgtgcctgagaatgaaccattacccggagaaggaagagactccggtcaaggaagagattgggttcggtgagcacactgatccacagttgatatcactgctcagatcaaacgacacagagggtttgcaaatctgtgtcaaagatggaacatgggttgatgttacacctgatcactcctctttcttcgttcttgtcggagatactcttcaggtgatgacaaacggaagattcaagagtgtgaaacatagagtggtgacaaatacaaagaggtcaaggatatcgatgatctacttcgcaggtcctcctttgagcgagaagattgcaccattatcatgccttgtgccaaagcaagatgattgcctttataatgagtttacttggtctcaatacaagttatctgcttacaaaactaagcttggtgactataggcttggtctctttgagaaacgacctccattttctctatccaatgtttga

SEQ ID NO: 244 - protein, 335 aa, Arabidopsis thaliana
MVIVLQPASFDSNLYVNPKCKPRPVLIPVIDLTDSDAKTQIVKACEEFGFFKVINHGVRPDLLTQLEQEAINFFALHHSLKDKAGPPDPFGYGTKRIGPNGDLGWLEYILLNANLCLESHKTTAIFRHTPAIFREAVEEYIKEMKRMSSKFLEMVEEELKIEPKEKLSRLVKVKESDSCLRMNHYPEKEETPVKEEIGFGEHTDPQLISLLRSNDTEGLQICVKDGTWVDVTPDHSSFFVLVGDTLQVMTNGRFKSVKHRVVTNTKRSRISMIYFAGPPLSEKIAPLSCLVPKQDDCLYNEFTWSQYKLSAYKTKLGDYRLGLFEKRPPFSLSNV

SEQ ID NO: 245 - DNA, 966 bp, Arabidopsis thaliana
atggtgaaagggtcccagaaaatcgtggccgtagatcaagacataccaataatagacatgtcgcaggagagatcacaagtgtcgatgcagatagtcaaagcctgcgagagtctcggcttcttcaaagtcatcaaccatggcgttgaccaaaccaccatctcaagaatggagcaagagtctataaacttctttgctaaaccggctcacgagaagaaatctgtccgaccagttaaccagcctttccggtatggttttagagacattggactcaacggtgactctggtgaggtcgagtatttgctgtttcacactaacgaccctgcctttcgctctcagctctccttcagctcggcagtgaattgttacatagaagcagttaagcagttggctcgtgagatcttagatctgacggctgagggacttcatgtcccacctcacagtttcagtaggttaatcagctccgtcgatagtgactccgttctgagagtgaatcattatccaccgtccgatcaattctttggtgaagccaatctttctgaccaatctgtgtcactgacaagagttggcttcggagaacacaccgaccctcagattttaacagttcttagatctaacggtgtaggagggctccaagtgtccaattcagatggcatgtgggtttctgtctcccctgacccttcagctttctgcgtcaatgtaggagacttgttacaggtgatgacgaacgggagatttataagtgtaaggcatagagcattgacctacggagaagaaagccggctatccacggcgtactttgccggaccaccgcttcaggcgaagattgggcctctttcggcgatggttatgacgatgaatcagccacggttgtaccaaacatttacttggggcgagtacaagaaacgtgcgtactctctacgacttgaggatagccgtttagacatgtttcgtacatgtaaggactag

SEQ ID NO: 246 - protein, 321 aa, Arabidopsis thaliana
MVKGSQKIVAVDQDIPIIDMSQERSQVSMQIVKACESLGFFKVINHGVDQTTISRMEQESINFFAKPAHEKKSVRPVNQPFRYGFRDIGLNGDSGEVEYLLFHTNDPAFRSQLSFSSAVNCYIEAVKQLAREILDLTAEGLHVPPHSFSRLISSVDSDSVLRVNHYPPSDQFFGEANLSDQSVSLTRVGFGEHTDPQILTVLRSNGVGGLQVSNSDGMWVSVSPDPSAFCVNVGDLLQVMTNGRFISVRHRALTYGEESRLSTAYFAGPPLQAKIGPLSAMVMTMNQPRLYQTFTWGEYKKRAYSLRLEDSRLDMFRTCKD

SEQ ID NO: 247 - DNA, 990 bp, Arabidopsis thaliana
atggttttgccatcttcaacaccgttacaaaccaccggaaagaagacgatatcctcgccggaatataacttcccggtgatcgatttctccttaaacgatcggtcaaaactatcggagaagatcgtaaaagcctgtgaggttaatgggtttttcaaggtgataaaccatggagttaaaccggagataataaagagattcgagcatgaaggagaagagttctttaataaaccggaatcagataagctacgagccggtccggcgagtccgttcggttacggatgcaagaacatcgggttcaacggcgatttgggtgagcttgagtatcttcttctccacgcaaatccgacagctgtcgctgataaatctgaaactatatctcatgatgatcctttcaagttcagctcggcgacgaatgattacatacgcacggttagagatttggcatgtgagatcattgatctgacgatcgagaatttatggggacagaagtctagcgaagtgagtgagctgatcagagacgttcgtagcgattcgatcctacggttgaatcactatccaccagcaccgtacgcgttaagtggcgttggtcaaataggtttcggagaacattctgaccctcagatcttgacggtgttaagatccaacgacgtagatggacttgagatttgctcacgtgacggcttgtggatcccaatcccatctgaccctacatgcttcttcgtattggtcggtgactgccttcaggcattgacgaatgggagattcactagcgtgaggcatagggttttagcaaacacagcaaagaagccacgtatgtcggcgatgtactttgcagctccaccgttagaggcgaaaatatcaccgttgccaaaaatggtgtcgccggaaaatccaagacgttataattcattcacatggggtgactacaaaaaagctacatactctctccgtttagatgtccctcgtctcgagtttttcaagactttatag

SEQ ID NO: 248 - protein, 329 aa, Arabidopsis thaliana [sequence omitted]

SEQ ID NO: 249 - DNA, 1011 bp, Arabidopsis thaliana
atggcttctcaacctccctttaagacaaatttctgctcgattttcggaagctcatttccaaattcaactagtgagagcaatacaaacacatcaactatccaaacctcaggcataaagcttcctgtgatcgatctcagccatctaactagtggtgaggaggtcaaacgcaaaagatgtgtgaaacaaatggttgcagctgcgaaagagtggggattttttcaaattgtgaaccatggaattcccaaagacgtctttgagatgatgctcctcgaagagaagaaactctttgaccaacctttttctgtgaaagtcagagaacgtttttcggacttatcgaagaatagttaccgttggggaaaccctagcgccacttctcccgctcagtactccgtttcggaagcgtttcacatcattctttcagaggtttcaaggatttctgatgatcgcaacaacctcagaacaatcgttgaaacgtatgtgcaagagatagctcgagtggcacaaatgatatgtgaaatactggggaaacaagtgaacgtgagttcggagtatttcgaaaacatttttgagcttgaaaacagttttctaaggctcaataagtaccatcctagtgtttttggttctgaagtgtttggtttggttcctcataccgatacaagttttctcactatactctctcaagatcaaatcggagggttagaattggaaaataatggacaatggatcagcgtaaaaccttgcttggaagcccttacagtcaacattggggatatgtttcaggcactgagtaatggagtgtaccaaagcgtgagacatagagtgatttctccagcaaatatcgagaggatgtcaatagctttcttcgtatgtccttatctcgaaactgagatcgattgctttgggtatccaaagaagtatagaagattcagtttcagagagtacaaagagcagagtgaacatgatgttaaagaaactggtgataaggtaggcttgtccaggtttctcatttga

SEQ ID NO: 250 - protein, 336 aa, Arabidopsis thaliana
MASQPPFKTNFCSIFGSSFPNSTSESNTNTSTIQTSGIKLPVIDLSHLTSGEEVKRKRCVKQMVAAAKEWGFFQIVNHGIPKDVFEMMLLEEKKLFDQPFSVKVRERFSDLSKNSYRWGNPSATSPAQYSVSEAFHIILSEVSRISDDRNNLRTIVETYVQEIARVAQMICEILGKQVNVSSEYFENIFELENSFLRLNKYHPSVFGSEVFGLVPHTDTSFLTILSQDQIGGLELENNGQWISVKPCLEALTVNIGDMFQALSNGVYQSVRHRVISPANIERMSIAFFVCPYLETEIDCFGYPKKYRRFSFREYKEQSEHDVKETGDKVGLSRFLI

SEQ ID NO: 251 - DNA, 1017 bp, Arabidopsis thaliana
atggatccaccattcaacgaaatatacaataaccttttgtataatcagatcacaaagaaagataacgatgtttctgaaataccctttagcttctcagtcacagccgtcgtcgaggaggtggagcttcctgtgattgacgtcagccgtttgattgatggagccgaggaggagagagagaaatgtaaggaagcgattgcgagagcttcgagggagtggggattttttcaagtgataaaccatggaatatcaatggatgtgttggagaagatgagacaagagcaaattagggtctttagagagccttttgacaagaaaagtaagtcggagaaattttccgccgggagttaccggtggggaacgccgtcagccacttctatccggcagctttcttggtcagaagcttttcatgttcccatgacagatatttctgacaacaaggactttactactctcagctcaacaatggagaaatttgcttcggaatcagaggcattagcatatatgttggcagaggttcttgcagaaaaatctggacaaaattcaagtttcttcaaagaaaactgtgtgagaaatacatgttatctaaggatgaaccgatatccaccttgtcccaaaccatcggaggtgtacggattaatgccacacacggacagtgatttcctcacaatcttgtatcaagatcaagtcggaggactccaacttatcaaagacaatagatggatcgctgttaaacctaatcctaaagctctcattatcaatattggtgacttatttcaggcatggagcaatggcatgtacaaaagtgttgaacaccgtgtgatgacgaacccaaaggtggagagattctcaacggcttattttatgtgtccatcatacgacgccgttatagagtgttcaagtgatcgtcctgcttatagaaatttcagcttcagagaattcagacaacaagttcaagaagatgttaagaagtttggttttaaagttggccttcctaggttccttaatcacgtctactaa

SEQ ID NO: 252 - protein, 338 aa, Arabidopsis thaliana
MDPPFNEIYNNLLYNQITKKDNDVSEIPFSFSVTAVVEEVELPVIDVSRLIDGAEEEREKCKEAIARASREWGFFQVINHGISMDVLEKMRQEQIRVFREPFDKKSKSEKFSAGSYRWGTPSATSIRQLSWSEAFHVPMTDISDNKDFTTLSSTMEKFASESEALAYMLAEVLAEKSGQNSSFFKENCVRNTCYLRMNRYPPCPKPSEVYGLMPHTDSDFLTILYQDQVGGLQLIKDNRWIAVKPNPKALIINIGDLFQAWSNGMYKSVEHRVMTNPKVERFSTAYFMCPSYDAVIECSSDRPAYRNFSFREFRQQVQEDVKKFGFKVGLPRFLNHVY

SEQ ID NO: 253 - DNA, 1161 bp, Physcomitrella patens
atggcgtcgactggggaggtgagtcaaggagaagaagattccgaggatgaggtgcagaagaaacctgagattcccctttactcaatgcaagctttgtgggacgggaagatgtcgttgaaggatttcgaggtgaaaggggaggagaaactcacattacctcacgatgtctttgagcatgacgaggccttacctgtgatcgacatcagcgcgcttttaggtacggacaaaaagattcgggatgagaacatggccgcgatgctggatgcggcgaagacatggggtttcttcaagatccgcaaccacggagtgcctctcgaagtggtaaagaaagtggagagtaatgtgaagaatttttttgcgttgcccatggagaagaaattgatggtgaaggccatcaactttgctttcgggtacgttgggggatccccagtctcctggcggtataaatggtggctggagggactgcacatgaaagttaactaccaggcaataagggacatggtgaatctagtgtggtctgatgacaaagactttgctgaagaattcatatctgacctgaccagttacttcgacaccatgcgatacttatcacgcctgatcgtagaatgcctaactgaaggcctcagcctaccccgcgacacctacaccaaactggaaacggaaaacgctatttgcaatgcgcgtgtgaaccactaccctgcatgtcctgacccgtctaaagtgttcggcatcccaggtcacacagaccctcagatgctgtcaatcctctaccaggacgatgtcggaggcctgcaggtgctcaaggatggcaagtggatcggtatccgtcccgacgactccaccttagtgtgcaatttgggtgatactttccaggtaataactaacggcatactgcacagcgcaggccatcgagtggccgtgaacgccaccaggtcccggtacgcaaccatctacttctacggcattgacaacgtgataccgctgtgcgtgccaccccaactcgtcaccaaagaccggcctctcaagtatcggccgttcactgtacatgaatatagagcacattgcgtagaaaaacaggtccccatagacggagtgaagttcctagagatccagccccagtccaacaatccctcaacctcacagtcgaaatcaccgcaataa

SEQ ID NO: 254 - protein, 386 aa, Physcomitrella patens
MASTGEVSQGEEDSEDEVQKKPEIPLYSMQALWDGKMSLKDFEVKGEEKLTLPHDVFEHDEALPVIDISALLGTDKKIRDENMAAMLDAAKTWGFFKIRNHGVPLEVVKKVESNVKNFFALPMEKKLMVKAINFAFGYVGGSPVSWRYKWWLEGLHMKVNYQAIRDMVNLVWSDDKDFAEEFISDLTSYFDTMRYLSRLIVECLTEGLSLPRDTYTKLETENAICNARVNHYPACPDPSKVFGIPGHTDPQMLSILYQDDVGGLQVLKDGKWIGIRPDDSTLVCNLGDTFQVITNGILHSAGHRVAVNATRSRYATIYFYGIDNVIPLCVPPQLVTKDRPLKYRPFTVHEYRAHCVEKQVPIDGVKFLEIQPQSNNPSTSQSKSPQ

SEQ ID NO: 255 - DNA, 1224 bp, Physcomitrella patens
atgacagcgggagccgagaaacagcccgaagacgggagtcatgaaaagcagaatgtacatttagactcgacgaaacaagctgccgcaagccccgtctacacaatgcaagcttttttcgatggtaagatgaaggtagaggactttgccagatcggagcaggagcggcccactgtcccgcacgatatcttcgacgatacgctccctgtcgttgacatcgccgcgattaaggacggcacggcagaagaacggcgtgccaacgtggtcaaaatgctgaaagcagcaaaatcgtggggttttttcaagatctccaatcacgaaatccccttgcaagtggttctaagtaacctgcaactcatcttcgtcacggccgatcatgcttgtgatgaagcggtgaagcgagtgaagaaaaacggaaagcaattttttgcgctgcccatggagaggaaacttcccgtgcgagcgccagattttgtgtttggttacacaggcggctctccggtcaattggaaatcaaaatggtggctagaagctctaatgatcaaggtcacggacgaggcgttggatgacatgatcggccaagtgtttccagacgaaaaagatttcggcgtacggttcaaggaggatttgaaggcattcttctccccgatgcatgagctctctcgattcatagtggaggaattaaccgaagccctcggcctggagcgtgacaccttcacccgccttgagacgccgggctccaattgcaccggacgcatgaaccactacccagtctgtcccaatccagactctgtgctggggattcctccccacgcagacacgcagttgctgggaattctgcatcaagatgatactggtggactgcaagtactgaaggatggggagtgggtgggaatccagcctgatgattccaccttcgttgtcaacattggtgataccttccaggcgattacgaatgggatccttcgcagtgcagcgcatcgagcagtggttaatgcgaagaaggaccggtactcaactatctacttttacggtattgacaactccatcactctcacagtgccgccaaagctcattaccgaagaccgccctctcaagtatcgcccatttacggtcagggaacacagaaaatacatcgtggacaacgaagtcccgatcaatgctgttcagcacttggagatcaatcccgaagccacggctttattcctcgaaaaattgtttggttaa

SEQ ID NO: 256 - protein, 407 aa, Physcomitrella patens
MTAGAEKQPEDGSHEKQNVHLDSTKQAAASPVYTMQAFFDGKMKVEDFARSEQERPTVPHDIFDDTLPVVDIAAIKDGTAEERRANVVKMLKAAKSWGFFKISNHEIPLQVVLSNLQLIFVTADHACDEAVKRVKKNGKQFFALPMERKLPVRAPDFVFGYTGGSPVNWKSKWWLEALMIKVTDEALDDMIGQVFPDEKDFGVRFKEDLKAFFSPMHELSRFIVEELTEALGLERDTFTRLETPGSNCTGRMNHYPVCPNPDSVLGIPPHADTQLLGILHQDDTGGLQVLKDGEWVGIQPDDSTFVVNIGDTFQAITNGILRSAAHRAVVNAKKDRYSTIYFYGIDNSITLTVPPKLITEDRPLKYRPFTVREHRKYIVDNEVPINAVQHLEINPEATALFLEKLFG

SEQ ID NO: 257 - DNA, 1224 bp, Physcomitrella patens
atgccagttgcgcagcctttacacccgtcgcatcacaagtcgctcatgcacgaagctccaaaccattttagaacactggcgccgaggaatggcctgcaccgagggcaaagcgacaattacagtgggttgcgtccagaagctgtgaaatctaacctgctaagaggcgctagcgctgatttgtccgagttcatttggcccaaggaccaatggccctccgtgtctcacaacgacttccacatggcacaagagttgcccaccgtggacctctcagacctgcaccatggctccgaagagagccgagaggcgacagcaaaattgctagtgaagacgttctccgaatggggattcgtgcaagttatcaaccacggggtgccaacggaggtcatcgagaaaatgcagaaccaagcacggaattttttcgatttgccactggaacaaaaggagaagggcgtcgcgtctagcaccagcaagcacgaaggctttggttatggcgttgaaagtgggttctactacgctggcaagccgtggatcgatcggtttcagtgccgatggagccccgtgtgcgagattcgtgagcccgtcgagaaggtgttcagccccactgacgccgaggagtttagcaccagcatagaggactacaatggccgactggacaagcttgcaatgcaaattttggaactaaccgcacagggtctcggccttccctctgacacgttcatcaagcccttcaacggcacagctggtgactgcattgcccgcatgaactactatccaccgtgtccactttcctctcttactctgggactcggtgctcatacagaccccaacctcttgaccatactgagccaatgtaaagtcggcggattgcaagtctgcaaaaatggcacatggatttcagtgaagcccaaacccgacacgctcattatcaacatcggagacacttttgaggcatggacaaatggacggttctgtagtgtggagcaccgcgctgttgtgaacgaatctgaagccaggatgtcactggtgtatttcgcctcacctccctccaagtccgttattcaaatcccggaacagctcatcaccgcgaagcatcccttgcgcttccggccttccttcacatgggaagaatacaagagccacttgttcaagaggcacgttggaggcaacggcgtcaaaacctcgaaagaatggttgcgattacccgcacccacctcgcacacataa

SEQ ID NO: 258 - protein, 407 aa, Physcomitrella patens
MPVAQPLHPSHHKSLMHEAPNHFRTLAPRNGLHRGQSDNYSGLRPEAVKSNLLRGASADLSEFIWPKDQWPSVSHNDFHMAQELPTVDLSDLHHGSEESREATAKLLVKTFSEWGFVQVINHGVPTEVIEKMQNQARNFFDLPLEQKEKGVASSTSKHEGFGYGVESGFYYAGKPWIDRFQCRWSPVCEIREPVEKVFSPTDAEEFSTSIEDYNGRLDKLAMQILELTAQGLGLPSDTFIKPFNGTAGDCIARMNYYPPCPLSSLTLGLGAHTDPNLLTILSQCKVGGLQVCKNGTWISVKPKPDTLIINIGDTFEAWTNGRFCSVEHRAVVNESEARMSLVYFASPPSKSVIQIPEQLITAKHPLRFRPSFTWEEYKSHLFKRHVGGNGVKTSKEWLRLPAPTSHT

SEQ ID NO: 259 - DNA, 1224 bp, Physcomitrella patens
atgccggtcgcgcagcctctgcatatgtcgcaccacaagtcgctgatgcgcggagtgccaaaccattacagaacaatggcgctgaagaacagcttgcaccgtgggcagagcgacaattatcacaggttgcggcccgaagctgtgaaatccaatcttctgagaggcgcaagtgccgatttgtccgagttcatttggcccaaggaccagtggccttctttagcccacaacgacttccagttggcgcaggagctccctaccgtggacctctcaggcttgctctttggctcagaggaggagagagataagacggcggacttgcttgtgaagatgttctccgaatggggatttgtgcaggtaatcaaccatggagtgccgacggaggttactcaaaaaatgatgatccaagctcggaatttctttgatttgcccttagaacagaaagagaagggcgtcgcgtccagctccagcaaacacgagggattcggctatggtgttgagagtggattctactatgctggaaagccttggatcgaccggttccagtgtcgctggagtcccgtgtgtgagatacgtgagcctgtcgagaaggtgttcagcccctcggacgccgaagaatttagcaacagcatagagagctacaatagccatttggataagctcgcaatgcaaattctggagctttgcgcacgagggcttggactcccccacgacacgttcacaaagcctttcaacggcacagctggcgactgcatcgcccgcatgaactactaccctccatgcccgctctcgtccctcactcttggacttggcgctcacacagaccccaacctcttgaccatcctcagccaatgcaaagtcggcggattgcaagtctgcaaaaacggcacttggatctccgttaaacccaagccggacacgcttgtcatcaacatcggcgacacttttgaggcatggacaaatggacggtttcagagcgtggagcaccgggctgtggtgaatgaaacagaggctcggatgtctctggtgtatttttcctcacctcccaccaagtcgctgattcaaataccggagcagctcatcactgctgagcacccattgaggtttaacccctcgttcacatgggaagagtataaaatgtatctgtttaagaagcatgtcgagggcaacggagtgaaagtcgccaaagactggctgcggagacctgccactacatcgcagaactga

SEQ ID NO: 260 - protein, 407 aa, Physcomitrella patens
MPVAQPLHMSHHKSLMRGVPNHYRTMALKNSLHRGQSDNYHRLRPEAVKSNLLRGASADLSEFIWPKDQWPSLAHNDFQLAQELPTVDLSGLLFGSEEERDKTADLLVKMFSEWGFVQVINHGVPTEVTQKMMIQARNFFDLPLEQKEKGVASSSSKHEGFGYGVESGFYYAGKPWIDRFQCRWSPVCEIREPVEKVFSPSDAEEFSNSIESYNSHLDKLAMQILELCARGLGLPHDTFTKPFNGTAGDCIARMNYYPPCPLSSLTLGLGAHTDPNLLTILSQCKVGGLQVCKNGTWISVKPKPDTLVINIGDTFEAWTNGRFQSVEHRAVVNETEARMSLVYFSSPPTKSLIQIPEQLITAEHPLRFNPSFTWEEYKMYLFKKHVEGNGVKVAKDWLRRPATTSQN

SEQ ID NO: 261 - DNA, 1161 bp, Physcomitrella patens
atggggtcaagtgagttgttgattcatggccaagataatcgtggaggcggtgaggtggaaaagaaatcggagattccgctctacacaatgcaagccttgtgggacggaaaaatatcgctgaaggattttgaagtggtaggaatggataaacctataatacctcacgatgtctttgagccggatgaagcgttacccgtcatcgatgtagaagcgctccttggtgctgacaacgaggctcgacttgagaacatggtcagaatgctagaagcagcaaagacgtggggtttttttaaaattcgcaaccacggcgtgtccctggaagtggtgaagaaagtggaggcgaatgtgaagaaattcttcgcattgcccatggagaagaaactattggtaaaagccaacaacttctctttcgggtatgttgggggatcgccagtcagctggaaatacaagtggtggctagaggggctacatatgaaagttcaagacgaggcaataaagaatattgtggacctggtgtggtccgatgatgaagagttttctacagaattcacagctgatttgacaaactatttcgccatcatgcgagatctgtcacgtctgatcgtagaatgcctgactgaaggcctcggccttccccgtgacacttacaccaaactcgaaacgccgaacgccatttgcaacgcacgtgtgaatcactaccccgcatgtcccgatccgtccagtgtgttcggcatcccaggccacaccgatccccaaatgctgtctattctgtaccaagacgacgtcggaggcctgcaagtgctcaaggatggcaagtggatcggcattcgtcccgatgactctaccttcgtggtgaatctgggcgacacttttcaggtcatttcgaacggcattctgcacagcgcagcccaccgagtcgcggtgaacaccaccaggtcccggtacgcaaccatctatttctacgggatcgacaatgagattccactcttcatcccaccccaacttgtcactaaagagaggccgcttaagtaccggcccttcactgtaaatgaatatagagaacacctagtgataaaacaagttcctatggatggcgtcaagtatctagagatggagcccgagatccaagacgctgcatcgccatccaactcctcacaataa

SEQ ID NO: 262 - protein, 386 aa, Physcomitrella patens
MGSSELLIHGQDNRGGGEVEKKSEIPLYTMQALWDGKISLKDFEVVGMDKPIIPHDVFEPDEALPVIDVEALLGADNEARLENMVRMLEAAKTWGFFKIRNHGVSLEVVKKVEANVKKFFALPMEKKLLVKANNFSFGYVGGSPVSWKYKWWLEGLHMKVQDEAIKNIVDLVWSDDEEFSTEFTADLTNYFAIMRDLSRLIVECLTEGLGLPRDTYTKLETPNAICNARVNHYPACPDPSSVFGIPGHTDPQMLSILYQDDVGGLQVLKDGKWIGIRPDDSTFVVNLGDTFQVISNGILHSAAHRVAVNTTRSRYATIYFYGIDNEIPLFIPPQLVTKERPLKYRPFTVNEYREHLVIKQVPMDGVKYLEMEPEIQDAASPSNSSQ

SEQ ID NO: 263 - DNA, 1173 bp, Physcomitrella patens
atgggggtatcggagatgaaccgaactgaggactgcgttgacgccgacatagtgatgaaagagcccgaagttgagacggccacaattcctacctacacaatgcaagctctgtgggacaagaagctgtcgctgaaggattttgaggtttccggagaggataagcccacattgccttacgatgtctttgagcaggacgaagtgcttcctatcattgacttacaagcgctgcttggaaacgataaggatgcccggtatgtgaaccttgcacggatgctggaagctgccaaaacgtgggggttctttaagattcgcaaccacggcgttgctttggaaacggtaaagaaagtggagcagaatgtgaagaagttctttgcgctgcccatggagaagaaactgcaagtgaaagcggtaaacttcgtattcggatacataggtggatctcctgtcagctggaagaacaaatggtggctagaaagtcttcacatgaaagtacaagaggaggcaatccggaagatggtggcactcgtatggagtgataacccaaagttcgcagacgagttcatgtcggctttgacgcgctactacagctcaatgcgagagctctctcggctgattgtggagtgtttgacggagggcctcggtcttccccccaacacctacaccaaacttgaaacaccagacgccatttgcaatgcgcgtgtgaatcactaccccgcttgtcctgacccatccaaagtgtttggaataccaagccatactgatcctcaaatgctgtcaattctgtatcaagacgacgttggaggtttgcaggtgctcagaaatggaaagtggatcggaattcgaccggatgattctacattagtggtcaaccttggcgacaccttcatggcaattacgaacggcattctgcacagcgcagtgcaccgagtggcgctaaacactacgaggtctcggtattccactatatatttttacggggttgataacgcggcgcctctcagtgtaccacctgagctcatcacagaggaccgcccgctattgtacagacccttcactgtgaatgaatacagagcaatcctcacagagcaccaagttcccgatgacggcataaagttccttcgcatccaacctggggtcactgcaacagccaggaagaaaatgttccgcaggtag

SEQ ID NO: 264 - protein, 390 aa, Physcomitrella patens
MGVSEMNRTEDCVDADIVMKEPEVETATIPTYTMQALWDKKLSLKDFEVSGEDKPTLPYDVFEQDEVLPIIDLQALLGNDKDARYVNLARMLEAAKTWGFFKIRNHGVALETVKKVEQNVKKFFALPMEKKLQVKAVNFVFGYIGGSPVSWKNKWWLESLHMKVQEEAIRKMVALVWSDNPKFADEFMSALTRYYSSMRELSRLIVECLTEGLGLPPNTYTKLETPDAICNARVNHYPACPDPSKVFGIPSHTDPQMLSILYQDDVGGLQVLRNGKWIGIRPDDSTLVVNLGDTFMAITNGILHSAVHRVALNTTRSRYSTIYFYGVDNAAPLSVPPELITEDRPLLYRPFTVNEYRAILTEHQVPDDGIKFLRIQPGVTATARKKMFRR

SEQ ID NO: 265 - DNA, 1131 bp, Physcomitrella patens
atggcatcaaatcaacctccgaatccattttcgctcattcgagcggcttccatcactccggcggcgcagagcagcttgcagtcgctgctgagtcaaggctcgcaggacttggcagatttcgtgtggccggaggatgaacgtccgactattccacacaacgattaccggcgcgatagggagctccctgtcatcgacttgtcaggcttgcaggatgggtccgacgagacgaagatgaaactggcgaagcggattgctgctgccggctcagagtgggggttttttcatctcataaaccatggtatccccgtcgctgacctagacgaggtgcagttacaaacccgacgcttcttcgagcttcccatggagcataagcagcgtgccatgagtcttgagactgccaacgcgaataatgtatatggttacggattgaacactactggatacaagtacgcaggtcgcccctggatcgagcgatttcagtgtagctggtcccccaagtccaatctccgcgagcaggctcagcgtttactcgatggtcaagcctttcacgatttccaagcagctgtggaatccttttgctcaggagcagagaagctggcgaagcttaccctggagttgtgtgctctggggttaggcctggctcctgatacttttagccaacacatgaatcccagccaatcgattgcacgattgaattattaccccgcctgtccgaccccggatctcacccttggtttgggcgcgcacactgatccctacaccctcactttcttacatcaatgtcaagtggggggattacaagtgtgtaaggacgggaaatggatcaccgttaagcctcgacgaggcgcgtatgttgtcaacgtcggagacaatctccaggcatggaccaatggacgattcaagagcgtggagcacagagctgtcctaaacgacaaagtgtcacggctatctctagtatttttttatgctcctcctctagacactgtcatatcagctcctcaagagctgatccaagctgacggcaagcgacgctacaaaagcttcacgtggggagagtatctcgattacttaaagaggcagaattttgagaagggcaagaatgagcgatgggtcgaaggctttgcactttga

SEQ ID NO: 266 - protein, 376 aa, Physcomitrella patens
MASNQPPNPFSLIRAASITPAAQSSLQSLLSQGSQDLADFVWPEDERPTIPHNDYRRDRELPVIDLSGLQDGSDETKMKLAKRIAAAGSEWGFFHLINHGIPVADLDEVQLQTRRFFELPMEHKQRAMSLETANANNVYGYGLNTTGYKYAGRPWIERFQCSWSPKSNLREQAQRLLDGQAFHDFQAAVESFCSGAEKLAKLTLELCALGLGLAPDTFSQHMNPSQSIARLNYYPACPTPDLTLGLGAHTDPYTLTFLHQCQVGGLQVCKDGKWITVKPRRGAYVVNVGDNLQAWTNGRFKSVEHRAVLNDKVSRLSLVFFYAPPLDTVISAPQELIQADGKRRYKSFTWGEYLDYLKRQNFEKGKNERWVEGFAL

SEQ ID NO: 267 - DNA, 987 bp, Medicago truncatula
atggtgctattatccaaaccatcatcagaacaatacacctatgttaggaacaacatgcaagcaactacattttcctcatcaattcctcttgttgacctatcaaaaccagatgcaaagagcctcatagtaaaagcttgtgaagattttggattcttcaaagtcataaaccatggaatccctatggaagctatatcccaattggaatctgaggccttcaaatttttctctctccctctaacagagaaagaaaaagctggtcctgcaaatccatttgggtatggtaacaaaaggattggacccaatggtgatgttggttgggttgaataccttcttctcaataccaatcaagaacataatttctctcttcatggcaaagacatagacaaatttaggtgtttgttgaatgattataagtgtgctatgaggaatatggcatgtgagatacttgatttgatggcagaagggttaaagattcaaccaaagaatgtgtttagcaagcttgtgatggataaacagagtgactctgcttttagggttaatcattaccctgcttgtcctgaattagctataaatggtgaaaatttgattgggtttggagaacacacagaccctcaaattatatcacttttgaggtcaaataatacttcaggatttcaaatttctcttagagatggaagttggatttcagtcccacctgatcatagatccttcttcatcaatgttggtgattctcttcaggttatgactaatgggaggttcaaaagtgtgagacatagagttttggcaaatggtatcaatccaaggctctcaatgatttactttggtggaccacctttgagtgagaaaatagcaccattgccttcactcatgaaaggaaatgaaagcttgtacaaagaatttacatggtttgagtacaagaattctacttatggaacaagattggctgacaataggctgggaaattatgaaaggattgctgcctcctaa

SEQ ID NO: 268 - protein, 328 aa, Medicago truncatula
MVLLSKPSSEQYTYVRNNMQATTFSSSIPLVDLSKPDAKSLIVKACEDFGFFKVINHGIPMEAISQLESEAFKFFSLPLTEKEKAGPANPFGYGNKRIGPNGDVGWVEYLLLNTNQEHNFSLHGKDIDKFRCLLNDYKCAMRNMACEILDLMAEGLKIQPKNVFSKLVMDKQSDSAFRVNHYPACPELAINGENLIGFGEHTDPQIISLLRSNNTSGFQISLRDGSWISVPPDHRSFFINVGDSLQVMTNGRFKSVRHRVLANGINPRLSMIYFGGPPLSEKIAPLPSLMKGNESLYKEFTWFEYKNSTYGTRLADNRLGNYERIAAS

SEQ ID NO: 269 - DNA, 972 bp, Medicago truncatula
atggtgttggcttcaccaaaaccaatgaggaatgaaacgattttaccaaatgatcttattccaatagtagaccttaagagtgaaaggtcagaagtaataaaacaaattgtgaaagcaagtgaagagtatggtttcttcaaggtgataaaccatggtattagtgatggaactattgagaaaatggaagaggcagggtttagtttctttgcaaaaccaatgtctcaaaagaaacaagctgcacctgcttatggttgtaagaacataggattcaatggagatattggtgaggttgagtaccttctcctcaatgcaaacacttcctccattgctcaaatatccaaaactatatccaatgatgatccacattctaacttcaggtgtagggtgagtgaatatacagaagcagtgaaagaggtggcatgtgagatattagagctaatggcagagggtttgggggtccctgatacaaaggttttcagcagtttgataaaggatattgatagtgactcagttcttaggctcaatcactacccacctacacttaacaaggacaagtcacattccaacaatgttggctttggggagcattctgaccctcagatcttgaccattcttagatctaatgacgtttctggtcttcaaatttctcttcaacatggtctctggattcctgttaaccctgacccagaagctctatgtattaatataggtgatgtccttgaggttatgacaaatggaaggtttgtaagcgtgagacatagggcaatgacaaactcatacaaatcaagaatgtcaatggcatattttggggctccacctctaaatgcttccattgttgctccaccagttttggttacaccaaccaggccctctctcttcagaccatttacttgggccgactacaaaaaagccacttactctctaaggcttggtgacaccagaattcaacttttcagagcaaacattgcatga

SEQ ID NO: 270 - protein, 323 aa, Medicago truncatula
MVLASPKPMRNETILPNDLIPIVDLKSERSEVIKQIVKASEEYGFFKVINHGISDGTIEKMEEAGFSFFAKPMSQKKQAAPAYGCKNIGFNGDIGEVEYLLLNANTSSIAQISKTISNDDPHSNFRCRVSEYTEAVKEVACEILELMAEGLGVPDTKVFSSLIKDIDSDSVLRLNHYPPTLNKDKSHSNNVGFGEHSDPQILTILRSNDVSGLQISLQHGLWIPVNPDPEALCINIGDVLEVMTNGRFVSVRHRAMTNSYKSRMSMAYFGAPPLNASIVAPPVLVTPTRPSLFRPFTWADYKKATYSLRLGDTRIQLFRANIA

SEQ ID NO: 271 - DNA, 1011 bp, Medicago truncatula
atggttgttttgtctaagccaacattaaataatttcttacttgtcaagtcatgcaaaccatcaacaactttgttgaatggtattcctgtcgtcgaccttgcagacccggaagcaaaaactcttatagtgaaggcttgtaaggaatttggattcttcaaagtggtgaaccatggtgttcctttggaatttatgtccaatttggaaaatgaagcactaaggtttttcaaaaaaccacagtctgagaaagacagagctggtcctcctgatccttttggttatggaagtaagagaattggttcaaatggtgatgttggttgggttgaatatatccttcttaatactaaccctgatgttatctctaacaagtctctttccttttaccgtgaaaatcgacaaaatctaaggtctgctgtggaagattatattgctgcaatgaagaaaatgtgctgtctagtgttggaattaatggctgatgggttggggattgagccaaagaatgtgttaagcaggttattgaaagatgagaaaagtgattcttgtttcagaattaaccattacccaccgtgccctgaggtgcaacaagcagcattgaatggaaggaatttgcttgggtttggggagcatacagacccacaagtcatttctgtcttgagatctaatagcacatcaggactgcaaatctgtctcactgatggaacttgggtttcagttccacctgatcacacttcttttttcatcaatgttggtgatactcttcaggtattgactaatggtaggtttaaaagtgtaaagcatagggttttggctgacacaacaaagtcaaggttgtcgatgatatactttggaggaccacccttgagtgaaaagatagtgcctttaccttctttaatgttaaaaaaagaagaaagtttgtacaaagagttcacgtggttggagtacaagaaagcaatgtacaattcaaggctggctgattatagacttgggccttttgaaaaatcttatggcaaatga

SEQ ID NO: 272 - protein, 336 aa, Medicago truncatula
MVVLSKPTLNNFLLVKSCKPSTTLLNGIPVVDLADPEAKTLIVKACKEFGFFKVVNHGVPLEFMSNLENEALRFFKKPQSEKDRAGPPDPFGYGSKRIGSNGDVGWVEYILLNTNPDVISNKSLSFYRENRQNLRSAVEDYIAAMKKMCCLVLELMADGLGIEPKNVLSRLLKDEKSDSCFRINHYPPCPEVQQAALNGRNLLGFGEHTDPQVISVLRSNSTSGLQICLTDGTWVSVPPDHTSFFINVGDTLQVLTNGRFKSVKHRVLADTTKSRLSMIYFGGPPLSEKIVPLPSLMLKKEESLYKEFTWLEYKKAMYNSRLADYRLGPFEKSYGK

SEQ ID NO: 273 - DNA, 969 bp, Medicago truncatula
atggtggtggcttccccaaattcgatcttaggggaaaggattatacctattgacctaccaatgatagacctatcagctgaaaaatcaatggtaataaaactcatagtaaaagcttgtgaagaatatggtttcttcaatgtgattaaccatggtgtccctcatgacatcatatccaaaatggaagaagtaggttttgatttctttgcaaaaccaatggaacaaaagaaactagttgcacttggtaatccctttggttatggatgcaagaatattgggttcaatggagacatgggtgaggtggaatatcttcttctcaatgccaatgctccttctattcctaatgattcatcaaacttcagctctagtgtaagtgcatatacagaagctgtgaaggagctggcatgtgagatattggagctaatggcagaaggtttgggggtccctgatacatccattttcagcacattcatcactcaacttgataatgactcactccttaggttcaatcactaccctcctaaagactgcaaagatagagacaactctaattcctacaacgttggctttggagaacattctgaccctcagattcttactatccttagatccaacgatgttgctggtctccaaatttcacttcaacatggtgtgtggaacccagttactcctgacccagctgctttctgtgttaacgttggtgatcttcttgaggttatgacaaatggaagatttgtaagcgtgagacatagggctgtgaccaactcatacaagtctagaatgtcggtggcatattttggggctccaccacttgatgcatgcattgttgctccctcagttatggttacaccaaacaggccctctcttctcttcaaaccattcacttgggcagaatacaagaaagtcacttactctctaaggcttggagacagccgcattgaccttttcaagaattgcacacaaatagagtaa

SEQ ID NO: 274 - protein, 322 aa, Medicago truncatula
MVVASPNSILGERIIPIDLPMIDLSAEKSMVIKLIVKACEEYGFFNVINHGVPHDIISKMEEVGFDFFAKPMEQKKLVALGNPFGYGCKNIGFNGDMGEVEYLLLNANAPSIPNDSSNFSSSVSAYTEAVKELACEILELMAEGLGVPDTSIFSTFITQLDNDSLLRFNHYPPKDCKDRDNSNSYNVGFGEHSDPQILTILRSNDVAGLQISLQHGVWNPVTPDPAAFCVNVGDLLEVMTNGRFVSVRHRAVTNSYKSRMSVAYFGAPPLDACIVAPSVMVTPNRPSLLFKPFTWAEYKKVTYSLRLGDSRIDLFKNCTQIE

SEQ ID NO: 275 - DNA, 999 bp, Medicago truncatula
atggttgttctttctcaacaagctacactaaacgagttatttcacataaacacatgcaaaccaacaagttatgtattcaaaggtgttccagaggttgacctttcagacccagaagctaagacactaatagtcaacgcatgtacagaatttggattctttaaggttgttaaccaccaagttccgttagagttgataaccaatttagaaaatgaaacactcaaattttttggacaacctcagttagagaaagagaaagcaggtccacctgatccttttgggtatggaagcaaaattattggtacaaacggtgatgtgggttgggttgaatatcttcttcttaatactaacccagatgtcatctctctcaagtctctttttcttttacagcaaaacacaaaaaacttcaggtgtgctgctgaagaatatatagtggcagtgaaggaggtgtgttgtgaagtattggaattaatggcagatggattgaggattgaaccaaggaatgtgtttagcagattggtgagagatgagagaagtgattcttgtttgagggtaaatcactacgcggcatgtggagaacttcaagcattgagtggaggaaatttgattggatttggggagcatactgacccacagataatatctgtcctaaggtctaataatgcatcaggactgcaaatttgtctcagagatgggacttgggtttcaatcccacctgatcacacttctttcttcataagtgttggtgactccttacaggtgattacaaatggggaattaaagagtgtaaagcatagggtattgactgacacaagtatgtcaaggttgtcaatgatttattttggagggccacccttgaatgaaaagttagtacctttgccttcaatattgggatcaaaagaacaacagagtttgtacaaagaattcacatggagggaatacaaaaatgctgcttacaagtcaaagcttgcttataataggctcagtctctttgagaaataa

SEQ ID NO: 276 - protein, 332 aa, Medicago truncatula
MVVLSQQATLNELFHINTCKPTSYVFKGVPEVDLSDPEAKTLIVNACTEFGFFKVVNHQVPLELITNLENETLKFFGQPQLEKEKAGPPDPFGYGSKIIGTNGDVGWVEYLLLNTNPDVISLKSLFLLQQNTKNFRCAAEEYIVAVKEVCCEVLELMADGLRIEPRNVFSRLVRDERSDSCLRVNHYAACGELQALSGGNLIGFGEHTDPQIISVLRSNNASGLQICLRDGTWVSIPPDHTSFFISVGDSLQVITNGELKSVKHRVLTDTSMSRLSMIYFGGPPLNEKLVPLPSILGSKEQQSLYKEFTWREYKNAAYKSKLAYNRLSLFEK

SEQ ID NO: 277 - DNA, 972 bp, Medicago truncatula; identical to SEQ ID NO: 269

SEQ ID NO: 278 - protein, 323 aa, Medicago truncatula; identical to SEQ ID NO: 270

SEQ ID NO: 279 - DNA, 1020 bp, Medicago truncatula
atggacccagtttccgacccaccatttgaagaagcatataagatcctcctgaacaaaaccaaaaacaatcgtaataatgtccccaacgacaacaagtttccggtggtggaggaatgcgaacttccggtgatcgatctgagccgcttagaggacgacaatgaaatggtaagagaagcatgcaagtatgagatagctagagcttcgcaagaatggggctttttccaggttataaatcatggaattccaaatgacattttcagtaggttaaaatgtgagcaagagaaagtttttaagcttccatttgataaaaagaccaaagaggacaagttcttgcaattttcttctggtagttaccgttggggaacaccttctgccacatgtgttggacagttatcttggtcagaggcatttcatatccctttaaaggatgtattagaatccaatgctcaaccaaatacacttagatcaacaattgaacaatttgctatcatatcatccaaccttgcacaaactttagctcatattctagctgaaaaaatggggcatgaatcaacttattttaaggagaattgcttgcccaatacttgttatcttcgattgaacagatatcctccatgtcctatagcttctgagattcatggtctaatgccacacactgatagtgacttcctaactatattgtatcaagatcaagtaggaggattgcaattggtgaaagacaagaaatggattgcagttaaaccaaatcctagtgctcttataatcaacataggtgacttattccaggcttggagtaatggactttacaagagtgttgagcatcgagttgttacaaatccaaaagttgaaaggttctctatggcgtatttcttgtgcccttcaaatgagagtgtgatagagagctgcaaaaagccatctctttacaaagagtttagcttccaagaatatcggcaacaagttcgagatgatgttcagaagttggggaccaaaataggcctacctagatttctcctattttaa

SEQ ID NO: 280 - protein, 339 aa, Medicago truncatula
MDPVSDPPFEEAYKILLNKTKNNRNNVPNDNKFPVVEECELPVIDLSRLEDDNEMVREACKYEIARASQEWGFFQVINHGIPNDIFSRLKCEQEKVFKLPFDKKTKEDKFLQFSSGSYRWGTPSATCVGQLSWSEAFHIPLKDVLESNAQPNTLRSTIEQFAIISSNLAQTLAHILAEKMGHESTYFKENCLPNTCYLRLNRYPPCPIASEIHGLMPHTDSDFLTILYQDQVGGLQLVKDKKWIAVKPNPSALIINIGDLFQAWSNGLYKSVEHRVVTNPKVERFSMAYFLCPSNESVIESCKKPSLYKEFSFQEYRQQVRDDVQKLGTKIGLPRFLLF

SEQ ID NO: 281 - DNA, 1020 bp, Medicago truncatula; identical to SEQ ID NO: 279

SEQ ID NO: 282 - protein, 339 aa, Medicago truncatula; identical to SEQ ID NO: 280

SEQ ID NO: 283 - DNA, 1014 bp, Medicago truncatula
atggttgtattgtccaaaacaagtttagagcaatatccatgtataagaaacttgaaacaaaccatattttcaactgaaatccctatggtggatctttccaaacccgatgcaaaaaaccttatagtaaaagcatgtgaagagtttggattctttaaggtgataaaccatggtgtttctatgaaatgtatatctttgttagaatctgaagctgttaagtttttttctatgtctattgatcaaaaggagaaagcaggaccagctaatccatttgggtatggtaacaagaaaattggacaaaatggtgatattggttgggttgaatatcttcttcttaccaataatcaagattttaaccaattcaaactttcccctgcttttggtaaagattcagataagcttcgctgtttattgagtgagtatatgtcaagtgtgaaaaagatgggatgtgagattcttgaattgatggcctcaggattgaatattgaagaaaataatgtatttagcaagcttctaatggataaagagagtgattgcattttcaggcttaatcattatcctccttgtcctcctaagtcaaatttgaataataatgaaaatgaaaatgtgattggttttggtgagcacacagatccacaaataatttcattgttgaggtcaaataacacttctggtcttcaaattcgtctcaaagataagagttggatttcagtcccttctgatcacaattccttctttgttaatgtcggtgattctcttcaggttatgactaatggacgattcaagagtgtgaggcacagagttttagcaaatgggttcaaatctagactctccatgatttattttggtggtccatctttgaatgagaaaattgcacctttgccttgtctcataaaaggaaatgaatgcttattatatagagagtttacatggtttgaatacaagaaatcagcttatgctacaagattatcagacaataggctttgtcactttgagagaatcaaagattcctcctaa

SEQ ID NO: 284 - protein, 337 aa, Medicago truncatula
MVVLSKTSLEQYPCIRNLKQTIFSTEIPMVDLSKPDAKNLIVKACEEFGFFKVINHGVSMKCISLLESEAVKFFSMSIDQKEKAGPANPFGYGNKKIGQNGDIGWVEYLLLTNNQDFNQFKLSPAFGKDSDKLRCLLSEYMSSVKKMGCEILELMASGLNIEENNVFSKLLMDKESDCIFRLNHYPPCPPKSNLNNNENENVIGFGEHTDPQIISLLRSNNTSGLQIRLKDKSWISVPSDHNSFFVNVGDSLQVMTNGRFKSVRHRVLANGFKSRLSMIYFGGPSLNEKIAPLPCLIKGNECLLYREFTWFEYKKSAYATRLSDNRLCHFERIKDSS

SEQ ID NO: 285 - DNA, 1092 bp, Paris polyphylla
atgcgagaggtctccagcattttacatacttcatgctatcttctactcccatctgcagaacacctctcctgtttttgctctgttttcggtgcaaaaatcatggtgatattctccaaggccgagctcgatcagatatccctcccaaattctcatgagtccatctacaacttccccgccgtggatctttcggagccgggtgctgggtctcggattgtcaaggcctgtgaggagctcggattcttcaaggtcaccagacatgggatccccactgagcttgtggagaggttggaggctgaggctgtgaagttctttgggatgccacagatggagaaggagaaggctaccctttgtggttatgggagaagaaggatagggtgtaatggggatgtggggaggttggagtacctcatggttcagatcacctccgatcccatgtctctcgaatcattcgccttccttgcagaaccgtcagcgagcttcttccgctctgctttggaggagtatgtatcagctgtgaggaagttggcttgccaaattctggagttgatggctgaagggctttctatcgagccaagaaatacgctgagcaagttggcaatgaacgaggagagcgactcagcttttaggctcaatcactaccctctttgcccgatcctcaaccgcatggatcgagtcccgatcgatttcggcgagcacacggacccacaaatcatatcggccttgagatccaacaacacttcgggtttgcagatatcactgagggatgatgggagctgggtctcagtcccgcctgaccgaaactcattcttcatcaatgttggtgattctctgcaagttttgacgaatggtcgattcagaagcgtgaagcatagggttttggccaatagggtggagccaaggctctccatgatctacttcgtcggccctccatccagagagaggttggtaccattgccgtccctgataaaagagggggagcagagcctctacagagagttcacatggtgcgagtacaagagattggcctacagaacgagattggctgagaataggctcggacgtttcgagaagcagagaggtgtccactgttga

SEQ ID NO: 286 - protein, 363 aa, Paris polyphylla
MREVSSILHTSCYLLLPSAEHLSCFCSVFGAKIMVIFSKAELDQISLPNSHESIYNFPAVDLSEPGAGSRIVKACEELGFFKVTRHGIPTELVERLEAEAVKFFGMPQMEKEKATLCGYGRRRIGCNGDVGRLEYLMVQITSDPMSLESFAFLAEPSASFFRSALEEYVSAVRKLACQILELMAEGLSIEPRNTLSKLAMNEESDSAFRLNHYPLCPILNRMDRVPIDFGEHTDPQIISALRSNNTSGLQISLRDDGSWVSVPPDRNSFFINVGDSLQVLTNGRFRSVKHRVLANRVEPRLSMIYFVGPPSRERLVPLPSLIKEGEQSLYREFTWCEYKRLAYRTRLAENRLGRFEKQRGVHC

SEQ ID NO: 287 - DNA, 1032 bp, Paris polyphylla
atggttgtggcatctccgatgccagggtgcaacgagagggtgctcggcctcggaattccgctgatcgacctctcgtggaggagggagcgggcgtcaaagctcatcgttaaggcaagcgagaagttcggattcttcagagtgatcaaccacggcgtgccaaagggggtggtagccaggatggaggccgaagcgatagaattcttctcgatgtcggcccaagagaagcaaaactccgggcccccgagcccgctaggctacgggataaggaacatcgggctcaaaggcgataccggggagctcgagtacctcatcctccacgccaaccctacctccgtcgccccgtgggcgaggacagtatgccggaaggacccgatgaaatttagctctatagtgaacgaatatgtggaggggacgagggggttagcatgcgacatactagaaatgatgggcgaagagctgcgactggatgatcgaagggctctcagtaaactaataagggacgacgagaatgattcgctcatcaggttcaaccattacggccctcattgttgcagcagtaataagaacggaaagagcccaaggatcggttttggggagcactcagaccctcagatactcagtatattacgatctaatggcgtcgaggggctgcagatactaatgtcttctgacgatggagatgtatggatccccgtgcccgcggaccctgatgccttctttgtcatcgtaggtgatgtcctccaggctttgactaatgggaggcttttgagtgtgaggcatcgagccatgtccaactccaactgctcaaggctttccatgatctacttcggtgcaccgacactccacacgatgatctctccactccccgagatggtctcattggagactccgtgtcgctatcgatcattcacatgggctgactacaagaaggcaatgtactcgcttcgactcacccacaatcgtctcgatctcttcctaatcaacattgcacaagacatcagtccattcgaaagaatacttcagattttgtga

SEQ ID NO: 288 - protein, 343 aa, Paris polyphylla
MVVASPMPGCNERVLGLGIPLIDLSWRRERASKLIVKASEKFGFFRVINHGVPKGVVARMEAEAIEFFSMSAQEKQNSGPPSPLGYGIRNIGLKGDTGELEYLILHANPTSVAPWARTVCRKDPMKFSSIVNEYVEGTRGLACDILEMMGEELRLDDRRALSKLIRDDENDSLIRFNHYGPHCCSSNKNGKSPRIGFGEHSDPQILSILRSNGVEGLQILMSSDDGDVWIPVPADPDAFFVIVGDVLQALTNGRLLSVRHRAMSNSNCSRLSMIYFGAPTLHTMISPLPEMVSLETPCRYRSFTWADYKKAMYSLRLTHNRLDLFLINIAQDISPFERILQIL

SEQ ID NO: 289 - DNA, 978 bp, Paris polyphylla
atgacggattcaaatccaccgctcttcagcaagtacaaggccctcctcgacatccggccgtcgatcgactatccgacggctgtggccgatgagtgcaacctccccctcatcgacctcagctccctgaggaccgacaaagcccgagcatgcaagagggcgatcgcagtagcggcgtccgagtggggtttctttcagttggtgaatcatgggatctcgcgagagctacaagacaggatacgagccgtgcaagttgatatttttcagcacccatttgcttggaagacgaccgagaggctgctcgacttctcgaatggcagctaccggtgggggacaccgacggccacttcgctgccacagttgtcgtggtcggaggcttaccatcttcccctcacaccttcagctgtggaagctaaagatagcacgaggcacacaatagaggagtttgcagtggcaatgtcaaggttggctcaccaactagcccaaatactagcagaagaattggggtacgagggtggctacttcaaggagagctgcaactgcgacacatgctaccttcggctgaatcactacccaccatgcgcggtgtcgggtcaggtgtttgggctaacccaacacaccgatagcgacttcctgaccgtccttttccaggatcaagttggtggcctccaactcatgaagggtgggagatggaactccgtgaagccaaatctcgatgctctgatcatcaacattggtgacttatttcaggcgtggagtaacggggtgtacaagagcgtggagcacagagtcgtggcgaatcccaagttagagagattctcagttgcgtactttctatgcccatcgtacgataccatggtccagagctatgcaaatccatcaatctacaaaacattcaccttcggagaatacaggcaaaaggtgatggaagatgttaaactgataggcaccaaggttggacttccaaggtttcttgcatga

SEQ ID NO: 290 - protein, 325 aa, Paris polyphylla
MTDSNPPLFSKYKALLDIRPSIDYPTAVADECNLPLIDLSSLRTDKARACKRAIAVAASEWGFFQLVNHGISRELQDRIRAVQVDIFQHPFAWKTTERLLDFSNGSYRWGTPTATSLPQLSWSEAYHLPLTPSAVEAKDSTRHTIEEFAVAMSRLAHQLAQILAEELGYEGGYFKESCNCDTCYLRLNHYPPCAVSGQVFGLTQHTDSDFLTVLFQDQVGGLQLMKGGRWNSVKPNLDALIINIGDLFQAWSNGVYKSVEHRVVANPKLERFSVAYFLCPSYDTMVQSYANPSIYKTFTFGEYRQKVMEDVKLIGTKVGLPRFLA

SEQ ID NO: 291 - DNA, 969 bp, Paris polyphylla
atggactccactgcggacccgtcctacccgcacattttccggcggcacgaatcggaccatgaaccggactgtgaaccgtaccgcaaggccggtccggaaatcccggtggtagacctgagagcgctggaccccggccggctcgccgaagcgtgcagagtgtgggggatttttcggctcgccaaccacgggattcccccgaccctctccaaccgaattctggaccgggctcggttgatcctatccgaacccttcgaggataagcggacccggttcggaggcggcccggtctcctacttctggggaaccccggccgtcgggaagcgggtgaggtccgtcaactgggtggaaggcctccacatccccctcgcccgtctccgctccggcgaggagcccgggtttggatcctcttcttttaggtgtttggtggatgaatatgtgcggcacatggcccggatcgcaagggagctcttcaatgcactgacggtcgatctcaaactggactctgtccaatcgacttcacacttctctgaacctgatgcgattctccgagtctatcgatacccacgccgcccaaatgcttgccacaatttcgggttggaagcccacagtgatagctccctcctatccatcttgaatcaagacgaggtcggagggctgcagatccttcgtgagggacggtggatcaatgttgcaccaatctccgacatgctcatcgtaaacatcggcgacatgatgcaggccattagtgataacgagtacatgagcgtggaacacagggtactggcgagctcgagcaaggaaaggatctcattgtgctacttcgcttacccatccgaagatggcttgatcagtagctcaagatacaagccatttacttacaaggatttcaaagccaaggtgcaggaggatatcgaggcaactggcttcaagattgggctcgaccggtttaggattactgatccaaactaa

SEQ ID NO: 292 - protein, 322 aa, Paris polyphylla
MDSTADPSYPHIFRRHESDHEPDCEPYRKAGPEIPVVDLRALDPGRLAEACRVWGIFRLANHGIPPTLSNRILDRARLILSEPFEDKRTRFGGGPVSYFWGTPAVGKRVRSVNWVEGLHIPLARLRSGEEPGFGSSSFRCLVDEYVRHMARIARELFNALTVDLKLDSVQSTSHFSEPDAILRVYRYPRRPNACHNFGLEAHSDSSLLSILNQDEVGGLQILREGRWINVAPISDMLIVNIGDMMQAISDNEYMSVEHRVLASSSKERISLCYFAYPSEDGLISSSRYKPFTYKDFKAKVQEDIEATGFKIGLDRFRITDPN

SEQ ID NO: 293 - DNA, 984 bp, Phaseolus vulgaris
atggtattgttgtccaaaacaacaacagagcaattctcctacatcaagaactgcatggcatccacattctcctccacaattcccatagtggacctttccaaacctgatgcaaagaccctcatagtgaaagcttgtgaggagtttggattcttcaaagtcatcaaccatggtgtccccatggaacctatatcacaattggaaactgaaaccctcaagttcttctctatgccactcaatgagaaggaaaaagcagggcctcccaacccatttgggtatggtagcaagaggattggacgcaatggtgatgttggctgggttgagtatcttcttctaaacaccaatcaagagcacggtttttctcccagtggcaaaaacgctgagaaactcaggggtctgttgactagttacatgtctcttgtgaagaaaatggcttgtgatattcttgagctgatggcagaagggttgaagattcagcagaagaatgtgttcagcaagcttctgatggataaacagagtgactctgttttcagggtgaatcattaccctgcttgccctgaacttgctgtgaatggtcagaacatgattgggtttggagaacacacagacccacaaataatctctctgctcaggtctaacaacacttcaggccttcagatttatctcagagatggaagttggattccagtcccacctgatcacaactccttcttcatcaatgttggagattctcttcaggttatgactaatggacggttccggagtgtgagacacagggttttggcaaacggattcaagtcgaggctctcaatgatttactttggaggtccacctttgagtgagaaaatagcaccattaccttctctcatcaaaggaaaacaaagcctatacaatgagtttacgtggtttgagtacaagaattcaacctatggttcaaaattggctgacaatagacttggacattttgagagaattgcagcttcataa

SEQ ID NO: 294 - protein, 327 aa, Phaseolus vulgaris
MVLLSKTTTEQFSYIKNCMASTFSSTIPIVDLSKPDAKTLIVKACEEFGFFKVINHGVPMEPISQLETETLKFFSMPLNEKEKAGPPNPFGYGSKRIGRNGDVGWVEYLLLNTNQEHGFSPSGKNAEKLRGLLTSYMSLVKKMACDILELMAEGLKIQQKNVFSKLLMDKQSDSVFRVNHYPACPELAVNGQNMIGFGEHTDPQIISLLRSNNTSGLQIYLRDGSWIPVPPDHNSFFINVGDSLQVMTNGRFRSVRHRVLANGFKSRLSMIYFGGPPLSEKIAPLPSLIKGKQSLYNEFTWFEYKNSTYGSKLADNRLGHFERIAAS

SEQ ID NO: 295 - DNA, 1029 bp, Phaseolus vulgaris
atggttgttctttctaaccaatctgcactgaacgagttgtttctggccaagacatgcaatccccccaccatgttcacggaggttcccgtggttgatctctcacgccctgatgccaaaacaatcatggtgaaggcctgccaagagattggtctcttcaaggtggtcaaccatggcattcccttggaggtgataacgcgtttggagaatgaagcgctcaagttcttcatgcaaagccagtcacacaaagacaaggccggtcctcccgaccctttcggctatggcagcaagagaattggcacaaacggtgacctgggttgggtcgagtatctcctcctcagcaccaaccctgacatcgtctcccccaaaactcttcagctttttcaccaaaacccgcaagttttcaggttgtgtgtggaggaatacataggggcagtgaagaagatgtgctgtgaagtgttggaagaaatgggtgaggggttggggatgggagaaaggaatgtgtttagcagaatgataagagaggagagaagcgattcatgcttgagggtgaataggtacccagcatgtccagagctgaaagaggaaggtgcactgagtggacgaaatttgattgggtttggagagcacacagacccacagatattatctgtcctcagatccaacaacacatcaggactgcaaatctgtctcccagatgggacttgggtttcaatcccccctgacccttcctccttttttgtcaatgttggtgacctcttgcaggttatgacaaatgggaggtttaggagtgttaagcacagggtgttggctgactcaagcttgtcaaggttgtcaatgatatattttggagggccatgtttggacgaaaagattggtcctttaccttcactggtgtcaagggaagaagagaatttgtacagagagttgacatggcgggaatacaagaatgctgcatacaagacaaggctctctgatgataggatcactctctttcaaaaatctgcagatcacactcacaaacagacttga

SEQ ID NO: 296 - protein, 342 aa, Phaseolus vulgaris
MVVLSNQSALNELFLAKTCNPPTMFTEVPVVDLSRPDAKTIMVKACQEIGLFKVVNHGIPLEVITRLENEALKFFMQSQSHKDKAGPPDPFGYGSKRIGTNGDLGWVEYLLLSTNPDIVSPKTLQLFHQNPQVFRLCVEEYIGAVKKMCCEVLEEMGEGLGMGERNVFSRMIREERSDSCLRVNRYPACPELKEEGALSGRNLIGFGEHTDPQILSVLRSNNTSGLQICLPDGTWVSIPPDPSSFFVNVGDLLQVMTNGRFRSVKHRVLADSSLSRLSMIYFGGPCLDEKIGPLPSLVSREEENLYRELTWREYKNAAYKTRLSDDRITLFQKSADHTHKQT

SEQ ID NO: 297 - DNA, 927 bp, Phaseolus vulgaris
atggcatccacatcctccttcacaattcccatagtggacctttccaaacctgatgcaaagagcctcatagtgaaagcttgtgaggagtttggattcttcaaagtcatcaaccatggtgtcccaatggaatctatatcacaattggaaactgaggccctcaagttcttctctatgtcaatcaatgagaaggaaaaagcagggcctccaaatccatttgggtatggtagcaagaggattggacaaaatggtgatgttggttgggttgagtatcttcttctaaacaccaacgaagagcacgatttttctctctgtgggaaaaaccctgagaatttcaggggtctgttgaatagttacacgtctcttgtgaagaaaatggcttgtggtattcttgagctgatggcagaagggttgaagattcagcagaggaatgtgttcagcaagcttttgatggatgaacagagtgactctatttttagggtgaatcattaccctgcttgccctgaacttgctgtgaatggtgagaacttgattgggtttggagaacacacagacccacaaataatctctctgctaaggtctaacaacacttcaggcctccagatttatctgagagatggaagctggatttcagtcccacctgatcacaactccttcttcatcaatgttggagattctcttcaggttatgactaatggacgattccggagtgtgaggcacagggttttggcaaatggattcaagtcgaggctctcaatgatttactttggaggtccacctttgagtgagaaaatagcaccattaccttctctcatcaaaggaaaccaaagcctatacaatgagtttacctggtttgagtacaagaattcaacttatggttcaaaattggctgataatagacttggacattttgagagaattgcagcttaa

SEQ ID NO: 298 - protein, 308 aa, Phaseolus vulgaris
MASTSSFTIPIVDLSKPDAKSLIVKACEEFGFFKVINHGVPMESISQLETEALKFFSMSINEKEKAGPPNPFGYGSKRIGQNGDVGWVEYLLLNTNEEHDFSLCGKNPENFRGLLNSYTSLVKKMACGILELMAEGLKIQQRNVFSKLLMDEQSDSIFRVNHYPACPELAVNGENLIGFGEHTDPQIISLLRSNNTSGLQIYLRDGSWISVPPDHNSFFINVGDSLQVMTNGRFRSVRHRVLANGFKSRLSMIYFGGPPLSEKIAPLPSLIKGNQSLYNEFTWFEYKNSTYGSKLADNRLGHFERIAA

SEQ ID NO: 299 - DNA, 996 bp, Phaseolus vulgaris
atggtgctggctgccccaatcccaataaggagcgatgggattctccccagtgagcttcccgtggtggacctctcaggcgagagggcggaagtggcaaaagtgatcgtgaaagcgtgtgaagaatacggtttcttcaaagtgataaaccacggtatcagcaaggaagttatagcgaaaactgaagaagcagggttcggtttctttgggaaagcgatggtggaaaagaaagtggcggcacctgcatatgggtgcaagaacataggtgtcaatggagacatgggtgaggtggagtaccttctcctcagtgccaccaccgactccattgctcacatttccaaaaccatatccactgacccattaaatctcagcaatagcttgagtgcatacacagaagcagtgaaagagctagcatgtgagatattggaggtgatggcagaggggctgggggtcccggacacttgggttttcagcagattgataagggatggtgaaagtgactcagtgctgaggctcaatcactacccacctataattaacagagagtggtgcatggagaaggacaaagataaggacaagtcatcacaaattagcaaggttgggtttggggagcattctgaccctcagatcctcaccattctcagatccaacgacgtgggaggcctacaaatttctcttccagatggggtgtggatcccagtcacccctgacccctctgcattctatgtgaatgtgggtgatgtactacaggttatgacaaatggaagatttgtgagcgtgagacacagggcaatgacgaactcatacaagtgtagaatgtcagtggcatattttggggctccacctctgcatgcaaccattgttgctccctcagttatggtcacacctcagaggccctctctcttcagacccttcacttgggccgaatacaagaaagccacatactctctcaagcttggagacacacgccttcagcttttcagaaactgcaaacgctga

SEQ ID NO: 300 - protein, 331 aa, Phaseolus vulgaris
MVLAAPIPIRSDGILPSELPVVDLSGERAEVAKVIVKACEEYGFFKVINHGISKEVIAKTEEAGFGFFGKAMVEKKVAAPAYGCKNIGVNGDMGEVEYLLLSATTDSIAHISKTISTDPLNLSNSLSAYTEAVKELACEILEVMAEGLGVPDTWVFSRLIRDGESDSVLRLNHYPPIINREWCMEKDKDKDKSSQISKVGFGEHSDPQILTILRSNDVGGLQISLPDGVWIPVTPDPSAFYVNVGDVLQVMTNGRFVSVRHRAMTNSYKCRMSVAYFGAPPLHATIVAPSVMVTPQRPSLFRPFTWAEYKKATYSLKLGDTRLQLFRNCKR

SEQ ID NO: 301 - DNA, 972 bp, Phaseolus vulgaris
atggtggttataaggagtgaaaagattttacccattcatcttcccgttgtggacttatccacagaaagatcaatggtgagaaaactcatagtgaaagcttgtgaggagtacggtttcttcaacgtgatcaaccatggagttccctgcgacaccatagccaaaatggaagaagcagcttttgatttctttgcgaagccactggcccaaaagaaacaacttcccctttatggctgcaagaacataggcttcaatggagacatgggagagattgagtaccttctccttagtgctactcctccctccatggctcacttcaacaacatctccaatgtgccttcaaacttcagctgtagtgtgagtgcatacacagagggagtgagggagctggcatgtgagattttggagctaatggcagagggtctgggggttccggatagatggtttttgagcaggttgatcagggaggttgatagtgactcagtcctgaggttcaatcactacccaccgatacttaacaaagactgcaaggataaggacaagtctccctcccacaaccacaccaaggttggctttggggagcattctgaccctcagatccttaccatcctcagatccaatgacgtgtgtggcctccaaatctctcttcaagatggggtgtggaacccagttgctcctgacccctcagctttctgtgttaatgtgggtgatctcttgcaggttatgacaaatggaagatttgtgagcgtgagacacagggctgtgacaaactcacacaagtctagaatgtcggtggcgtattttgggggtccaccacttgatgcatgcattgttgctccctcagttatggttacaccccagaggccctccctcttcaaacccttcacttgggctgaatacaagaaagtcacctactcaatgaggctgggagaacgccgcattgaccttttcaggaactgcactcaactcgactga

SEQ ID NO: 302 - protein, 323 aa, Phaseolus vulgaris
MVVIRSEKILPIHLPVVDLSTERSMVRKLIVKACEEYGFFNVINHGVPCDTIAKMEEAAFDFFAKPLAQKKQLPLYGCKNIGFNGDMGEIEYLLLSATPPSMAHFNNISNVPSNFSCSVSAYTEGVRELACEILELMAEGLGVPDRWFLSRLIREVDSDSVLRFNHYPPILNKDCKDKDKSPSHNHTKVGFGEHSDPQILTILRSNDVCGLQISLQDGVWNPVAPDPSAFCVNVGDLLQVMTNGRFVSVRHRAVTNSHKSRMSVAYFGGPPLDACIVAPSVMVTPQRPSLFKPFTWAEYKKVTYSMRLGERRIDLFRNCTQLD

SEQ ID NO: 303 - DNA, 999 bp, Phaseolus vulgaris
atggttgttctgtctcagccagcattgaaccagtttttccttctgaaaccattcaagtccacgcccttgttcacggggattcctgtggtcgacctcacgcaccccgatgccaagaatctcatagtgaacgcctgtagggacttcggtttcttcaagcttgtgaaccatggtgttccattggagttaatggccaatttagaaaaagaggccctcaggttctttaaaaaatctcagtccgagaaagacagagctggtccccccgaccctttcggctatggtagcaagaggattggcccaaacggtgatgtcggttgggtcgaatacctcctcctcaacaccaaccctgaggttatctcacccaaatcactttgcattttccgagaaaatcctcatcatttcagggcggtggtggagaactacattacagcagtgaagaacatgtgctatgcggtgttggaattgatggcggaggggttggggataaggcagaggaatacgttaagcaggttgctgaaggatgagaaaagtgattcgtgtttcaggttgaaccactacccgccttgccctgaggtgcaagcactgaaccggaatttggttgggtttggggagcacacagacccacagataatttctgtcttaagatctaacagcacatctggcttgcaaatctgtctcacagatggcacttgggtttcagtcccacctgatcagacttcctttttcatcaatgttggtgacgctctacaggtaatgactaatgggatgtttaaaagtgtaaagcatagggttttggctgacacaacgaagtcaaggttatcaatgatctactttggaggaccagcgttgagtgaaaagatagcacctttaccttcagtgatgttaaaaggagaggagtgtttgtacaaagagttcacatggtgtgaatacaagaaggctgcgtacacttcaaggctagctgataataggcttgcccctttccagaaatctgctgctgattaa

SEQ ID NO: 304 - protein, 332 aa, Phaseolus vulgaris
MVVLSQPALNQFFLLKPFKSTPLFTGIPVVDLTHPDAKNLIVNACRDFGFFKLVNHGVPLELMANLEKEALRFFKKSQSEKDRAGPPDPFGYGSKRIGPNGDVGWVEYLLLNTNPEVISPKSLCIFRENPHHFRAVVENYITAVKNMCYAVLELMAEGLGIRQRNTLSRLLKDEKSDSCFRLNHYPPCPEVQALNRNLVGFGEHTDPQIISVLRSNSTSGLQICLTDGTWVSVPPDQTSFFINVGDALQVMTNGMFKSVKHRVLADTTKSRLSMIYFGGPALSEKIAPLPSVMLKGEECLYKEFTWCEYKKAAYTSRLADNRLAPFQKSAAD

SEQ ID NO: 305 - DNA, 1038 bp, Phaseolus vulgaris
atggactccgtttcggacccaccctttcacgaggcatacaagatcctatttgataggaccccagagaatattaatggttctgataacgattttctggtggccgaggaatgccagcttccggtgatcgatctcagccgtttagaggagagtgatgagagtgtgagggaagagtgcaagtcacacatagctagggcttcacgggactggggtttcttccaggtcgtgaaccatggtatttccagtgatattttcagcaggttgagatgtgaacaagaaaaagttttcaggcaaccctttgagaagaagatgaaagaggacaagttcttgaacttctccgccggaagctaccgttggggaacccccactgccacatgcattagacagttatcttggtcagaagcctttcatattcctctaaccgatatactaggatcctctcgatcaaactctcttagttcgacaattgaacagtttgctacaacagtttcgagccttgcacaaacattagccgacatactggcggagaaaatgggtcacaagtcaaccttctttaaggagaattgtttggcgaacacctgctatcttcgactcaaccgatatcctccatgccctactgcttttgggattcacggtctcatgccacacactgacagtgactttctcaccatattatatcaggatcaggttggaggtttgcaattggtcaaagacacaaaatggatcgcagttaaaccaaaccccgatgcccttataatcaacattggtgacttgttccaggcatggagcaacggggtgtacaagagcgtggagcatcgcgttatgaccaacccgaaactagagaggttctctatggcgtatttcttgtgtccttcaaatgatactgtgatagagagttgcagagagccctctatttacagaaaattcagctttcgggagtatagaaaacaggttcgtgatgatgttcagaagttgggtaccaaaataggcttgcccaggtttctcacacacgaaggaagttcgaacatagcaagcgcataa

SEQ ID NO: 306 - protein, 345 aa, Phaseolus vulgaris
MDSVSDPPFHEAYKILFDRTPENINGSDNDFLVAEECQLPVIDLSRLEESDESVREECKSHIARASRDWGFFQVVNHGISSDIFSRLRCEQEKVFRQPFEKKMKEDKFLNFSAGSYRWGTPTATCIRQLSWSEAFHIPLTDILGSSRSNSLSSTIEQFATTVSSLAQTLADILAEKMGHKSTFFKENCLANTCYLRLNRYPPCPTAFGIHGLMPHTDSDFLTILYQDQVGGLQLVKDTKWIAVKPNPDALIINIGDLFQAWSNGVYKSVEHRVMTNPKLERFSMAYFLCPSNDTVIESCREPSIYRKFSFREYRKQVRDDVQKLGTKIGLPRFLTHEGSSNIASA

SEQ ID NO: 307 - DNA, 1032 bp, Phaseolus vulgaris
atggactcgaattcaaacccaccccttcacgaggcatacgatatgctcttgagcaagagccgaaacagtaacgaacagagtggttttgatgatgatgaggtgttggtggtggaggagacagagttgccagcgatcaatgtgagtcatttagcagagagtgatgaagtgaggagggaggagtgcaagtccgagatagctaaggcttctcaagaatggggtttctttcagatcgttaatcatggaatttccaatgacgttttcagtgttttgagggtcgaacgagagaagatatttaagcaaccttttgagaagaagagcaaagagaacaagctcttcaacttttccactggtagctaccgttggggagcccccactgcaacatgcattaggcagttatcttggtctgaagcattccatattcctctaactgatatactcagttccaccgattccaacacttttagctcaaccattgaagagtttgccagccaagtttctattctggcgaaaacgttggctcatatcctggctgagaaaatgggtcacaagtgtagtttctttgaggagaattgtttgcccagttcttgttatattcgattgaatcgatatcctccatgccccttggcttctgaggttcacggactgatgccacatacagacactgctttcctcaccatcttacatcaagatcaggtcagaggtttgcaaatcgtgaaagatgggaaatggattgcagtcaaaccaaaccctgatgcccttgtaatcatcattggcgacttgttccaggcatggagcaatggagtttacaaaagtcttgaacaccgagttatgacgaacccaaaattagagagattctctatggcgtatttcttttgcccctctgatgatacattgatagaaagctgcacagaggcgtcgaagtacaggaactttagctttggggaatatagacaagaagttcgagatgatgttcagaagttgggctacaaaattggcctaccaaagtttctcatacgtagaggagctacgtaa

SEQ ID NO: 308 - protein, 343 aa, Phaseolus vulgaris
MDSNSNPPLHEAYDMLLSKSRNSNEQSGFDDDEVLVVEETELPAINVSHLAESDEVRREECKSEIAKASQEWGFFQIVNHGISNDVFSVLRVEREKIFKQPFEKKSKENKLFNFSTGSYRWGAPTATCIRQLSWSEAFHIPLTDILSSTDSNTFSSTIEEFASQVSILAKTLAHILAEKMGHKCSFFEENCLPSSCYIRLNRYPPCPLASEVHGLMPHTDTAFLTILHQDQVRGLQIVKDGKWIAVKPNPDALVIIIGDLFQAWSNGVYKSLEHRVMTNPKLERFSMAYFFCPSDDTLIESCTEASKYRNFSFGEYRQEVRDDVQKLGYKIGLPKFLIRRGAT

SEQ ID NO: 309 - DNA, 999 bp, Populus trichocarpa
atggtgcttatatccaagccagctcttgaacagttctcgtttataagaaacagaaaacctaccacagttttttctggaatccctctaatagacctctcaaaacctgactccaagcacctactggttgaggcatgcgaggaatttggatttttcaaggtaatcaaccatggagtgcctatggaattcatatccaagctggaatctgaagctgtcaatttcttctcattaccgctctctgagaaagaaaaagtaggccctcctagcccctttggctatggtaacaaaagcattggacaaaatggtgatgtgggctgggtagaataccttctcttaaccactaatcaagaatcaatttctcagaggttctcttcagtttttggtgacaacccagaaaagtttcggtgtgctttaaatgattatgtatcagctgtgaagaaaatggcatgtgagattcttgaaatgatggctgatggtctaaaacttcaacaaagaaatgtgtttagtaaacttttgatggatgaacagagtgactctgtttttaggctaaatcactaccctccatgcccagaaattgaagcattgactgaccaaaacatgattggatttggagagcatacagacccacaaatcatttctgtgttaagatccaacaacacttctggcctgcaaatctctctcagtgatggcagctggatttcagttccacctgatcagaactcattttttgtcaatgttggtgactcattacaggttatgactaatgggaggtttaagagtgtcaggcacagggttttgaccaacagcatgaaagctagagtttcaatgatttattttggtggaccacctttgagtgagaaaatagctccattgccctcgctcataaaaggaaaggaaagcttgtacaaagaatttacatggttcgagtacaaaagatctgcctacagctccagattggctgataataggcttgtcctctttgagagaatagcagcctcgtaa

SEQ ID NO: 310 - protein, 332 aa, Populus trichocarpa
MVLISKPALEQFSFIRNRKPTTVFSGIPLIDLSKPDSKHLLVEACEEFGFFKVINHGVPMEFISKLESEAVNFFSLPLSEKEKVGPPSPFGYGNKSIGQNGDVGWVEYLLLTTNQESISQRFSSVFGDNPEKFRCALNDYVSAVKKMACEILEMMADGLKLQQRNVFSKLLMDEQSDSVFRLNHYPPCPEIEALTDQNMIGFGEHTDPQIISVLRSNNTSGLQISLSDGSWISVPPDQNSFFVNVGDSLQVMTNGRFKSVRHRVLTNSMKARVSMIYFGGPPLSEKIAPLPSLIKGKESLYKEFTWFEYKRSAYSSRLADNRLVLFERIAAS

SEQ ID NO: 311 - DNA, 996 bp, Populus trichocarpa
atggtagttccttctccaactccagcacgaaccaaaaaaacgaaggcctttggaattcctactgttgatctctctcttgataggtcaaacgtatcgaaactgatcgtaagggcatgtgaagaatatggattcttcaaagttacgaatcatggggtcagtaaggaggtcgtaaccagaatggaggaggaagctgctcattttttctcaaaaccagccacggaaaagcaccgagctggacctgctagtccttttggctatggttgcaaaaatattggctgcaatggtgacatgggcgagcttgaatatcttctcctccacgccaatcctctctccgtctttgaaagatccaaaaccatctcaaatgacccttcagaattcagctgcgtggtgaatgattacatacaagcggttaagcaactggcgtgtgagattcttgatctaacggctgagggcttgtgggtcccggataaacgtgcattcagcaggctcatcagagatgtccacagcgattctgttcttagacttaatcactaccctgcattcgaagagatcatggactgggacccatcacctaaaacaattggttttggcgagcactccgaccctcaaatcttgaccatcttgcgatccaacgacgttgggggcctccaaatttatttgcgtgatggcttgtgggtccctgttcctcctgaccccaccggattctatgtgatcgtgggggatgccttccaggttttaacgaatgggaggtttgaaagcgttagacacagagtgttggcgagctcggggaagccaagaatgtcaatgatgtactttggggcgccaccgcttaacgcatggatctctccgcctccacagctggtcttgccacaaaatccaagcctctacaaacccttcacttggagtgaattcaagaaagctgcctattctctgcgattgagagatacgcgtcttgacctcttcaagattcatgccacagaaaaatttgcttcttga

SEQ ID NO: 312 - protein, 331 aa, Populus trichocarpa
MVVPSPTPARTKKTKAFGIPTVDLSLDRSNVSKLIVRACEEYGFFKVTNHGVSKEVVTRMEEEAAHFFSKPATEKHRAGPASPFGYGCKNIGCNGDMGELEYLLLHANPLSVFERSKTISNDPSEFSCVVNDYIQAVKQLACEILDLTAEGLWVPDKRAFSRLIRDVHSDSVLRLNHYPAFEEIMDWDPSPKTIGFGEHSDPQILTILRSNDVGGLQIYLRDGLWVPVPPDPTGFYVIVGDAFQVLTNGRFESVRHRVLASSGKPRMSMMYFGAPPLNAWISPPPQLVLPQNPSLYKPFTWSEFKKAAYSLRLRDTRLDLFKIHATEKFAS

SEQ ID NO: 313 - DNA, 999 bp, Populus trichocarpa
atggtagtactttcccaactagctctagaacctttctcagttatcaaaacatgcaagcctataggcttgttttccgagatacccgttatagacttgacagaccctcatgccaagactctcataatcaaggcctgtgaagagtttggattcttcaagctggtaaatcatggagttccaatggaagtcatgaccaaattggaagctcttgctaccaacttctttaacctcccccagcctgagaaagacaaggctggacctcctaacccttttggctacggaaacaagaaaattggccctaatggtgatgttggttgggttgaatatctcctccttaacaccaaccctcaaatctcctcccaaaaaacgtccatttttcaggaaaacccacagattttccgctctgctgttgaagattacatactggcagtgaagagaatggcttttgaagtattggaattgatggctgatgggctggagattgagtcaaggaatgtgttcagtaggctgttgagggatgataagagtgattcatgtttcaggctaaaccactacccaccatgctcagagctgcaagcattgagtggtggaaatttgattgggtttggcgagcacacagacccacagataatatctgttctaagatctaacaacacaagtggcctgcaaatttgtctgaaagagggaacttgggtttcagtcccccctgatcagacctcttttttcatcaatgttggtgatgccttgcaggtgatgacaaatggaaggtttaggagtgtcaagcacagggttttggctgatcccctgaaaccaaggatttccatgattttcttcggtggtccacctttaagtgaaaagatagcacctttaccctccttgatggcagaaagaggaggaagcttatacaaggagttcacatggtttgaatacaaaaggtccgcatacaagtcaaggctagctgattacagacttgggctatttgagaaaactgcaggccaatga

SEQ ID NO: 314 - protein, 332 aa, Populus trichocarpa
MVVLSQLALEPFSVIKTCKPIGLFSEIPVIDLTDPHAKTLIIKACEEFGFFKLVNHGVPMEVMTKLEALATNFFNLPQPEKDKAGPPNPFGYGNKKIGPNGDVGWVEYLLLNTNPQISSQKTSIFQENPQIFRSAVEDYILAVKRMAFEVLELMADGLEIESRNVFSRLLRDDKSDSCFRLNHYPPCSELQALSGGNLIGFGEHTDPQIISVLRSNNTSGLQICLKEGTWVSVPPDQTSFFINVGDALQVMTNGRFRSVKHRVLADPLKPRISMIFFGGPPLSEKIAPLPSLMAERGGSLYKEFTWFEYKRSAYKSRLADYRLGLFEKTAGQ

SEQ ID NO: 315 - DNA, 1005 bp, Populus trichocarpa
atggtagtggcatctccaactaaacttcacagtgaagaacacctggccattgagcttcctacagtagacctctcaggagatagatcaatggtttccaatctcattgtcaaagcctgtgaggaatatggtttcttcaaggtgaaaaaccatggtgttcctcatgacatcattgcccaaatggagaaagaaagtttcaacttctttgccaaaccattcgatgaaaagcaaaaggttgagccggccaaaccctttggttatggctgcaaaaatattggcttcaatggtgatatgggagaggtggaatatctacttcttaatatcaaccctctctccatagctgaaaggtccaaaaccatctccaatgaccctgcaaaattcagctccgctgtgagtgcttacatagaagcagttagggagctggcatgtgagttattagatctgatggcggaggggctgcgggtcccggatagatcagtgtttagtaggctaatcagagatgttgacagtgactccctcatcaggttaaaccactacccccctatgcctctgctctgcaaggatgaggactcgtcaccttgtaaccaaaacaaggtagggttcggagagcattctgaccctcagatcttgaccatcttgagatccaacgatgtgggtggccttcagatttccttaaatgatggtgcgtgggtcccagtaacacctgatcccgctaccttctgggttaatgtgggtgacttgttacaggcaatgacaaatgggagatttgtaagtgtgaggcacaaagccctaaccaactcttccaagtctagaatgtcaatggcctattttgctggccctccacccaatgcgaggatcactgttccaccagaaatgattacccccaccaagccggcattatacaagccctttacctgggctgaattcaagaaagctgcttatgctatgcgacttggagatagacgccttggtctattcaggatggaaggagacgagcaagttgcttga

SEQ ID NO: 316 - protein, 334 aa, Populus trichocarpa
MVVASPTKLHSEEHLAIELPTVDLSGDRSMVSNLIVKACEEYGFFKVKNHGVPHDIIAQMEKESFNFFAKPFDEKQKVEPAKPFGYGCKNIGFNGDMGEVEYLLLNINPLSIAERSKTISNDPAKFSSAVSAYIEAVRELACELLDLMAEGLRVPDRSVFSRLIRDVDSDSLIRLNHYPPMPLLCKDEDSSPCNQNKVGFGEHSDPQILTILRSNDVGGLQISLNDGAWVPVTPDPATFWVNVGDLLQAMTNGRFVSVRHKALTNSSKSRMSMAYFAGPPPNARITVPPEMITPTKPALYKPFTWAEFKKAAYAMRLGDRRLGLFRMEGDEQVA

SEQ ID NO: 317 - DNA, 1209 bp, Populus trichocarpa
atgattctctctctcctatatatctatagcaacttagcaagcatgagcaggcacctcaccgtttctcacctccttctttccagtctctccatctctcaaaatattcctctgtcacctcttctcttctatatcttccaagtgctcctcttccttgttttagtttcctttatcttgtgtctccgaagatatataattatagacatggtagtggcatccccaactcaaattcacggggaaaaactcctggccattgagcttcctgtaatagatctctcaggcgagagatcaatggtgtccagtctcattgtcaaagcctgtgaagaatatggttttttcaaggtaaaaaaccatggcgttcctcatgacatcattgccaaaatggaaaacgaaagtttcaacttctttgccaaaacattcgatgaaaagcaaaaggctgggcttgataattcctttggttatggctgcaaaaacattggctttaatggtgatacaggagaggttgaatatctgctttgtaataccaatcctctctccattgctgaaagatccaaaaccatctccaatgaccctacagaattcagctctgcaatgagcggctacatagaagcagttagggagctggcatgtgagttattagatctgatggcagagggattgtgggtcccagatagatcagtgttcagtcgactaatcagagatgatgacagtgactcaatcatcaggttaaatcactaccctgccatgcctatactctgcaaggataaggactcctcatcaccttgtaaccacaacaaggtaggatttggagagcattctgaccctcagatcttgaccatcttaagatccaacgacgtgggtggccttcagatttccctgaatgatggtgcctgggttccagtaacacctgaccccactgccttctgtgttaatgtgggtgacttgttacaggcaatgacaaatgggagatttgtaagtgtgaggcacaaagccctaaccaactcatacaagtctagaatgtcaatggcctattttgctgcacccccacttaatgcaaggatcgctgttccaccagaaatggttacacccatcaagcctgccttatacaggcctttctcctgggctgaattcaagaatgctgcttttgctctgcgacttggagatagccgccttggtctattcatgctggaagtagatgaccaagttgcttga

SEQ ID NO: 318 - protein, 402 aa, Populus trichocarpa
MILSLLYIYSNLASMSRHLTVSHLLLSSLSISQNIPLSPLLFYIFQVLLFLVLVSFILCLRRYIIIDMVVASPTQIHGEKLLAIELPVIDLSGERSMVSSLIVKACEEYGFFKVKNHGVPHDIIAKMENESFNFFAKTFDEKQKAGLDNSFGYGCKNIGFNGDTGEVEYLLCNTNPLSIAERSKTISNDPTEFSSAMSGYIEAVRELACELLDLMAEGLWVPDRSVFSRLIRDDDSDSIIRLNHYPAMPILCKDKDSSSPCNHNKVGFGEHSDPQILTILRSNDVGGLQISLNDGAWVPVTPDPTAFCVNVGDLLQAMTNGRFVSVRHKALTNSYKSRMSMAYFAAPPLNARIAVPPEMVTPIKPALYRPFSWAEFKNAAFALRLGDSRLGLFMLEVDDQVA

SEQ ID NO: 319 - DNA, 1107 bp, Populus trichocarpa
atggttgtgtgtgtgtttgtgtatattataagtagcatttttgtatatcaactcagccgagctctctctatctctctgtcttctttcctcctgcagacaacaacaaccatggtgctcgtgcccaagccagcacttcaacagttctcgtttataagaaacatcaaacccaccacattcttttctggaatccctctaatagacctctcaaaacccgactccaagcacctcctggtcaaggcatgtgaggaatttggatttttcaaggtagtcaaccatggcgtgcctttggaattcatttcgaagctggaatcggaagctgtcaagttcttctcattaccgctttctgagaaagaaaaagcaagccctcctaatccctttggctatggtaagaaaagcattggacaaaacggtgatgtgggttgggtagaataccttctcctgaccactaatcaagaatcagtttctcagagactctcttcagtttttggtgacaacccagaaaagtttcggtgtgctttgaatgattatgtatcagctgtgaagaaaatggcatgtgagattcttgaaatgatggctgatggtctaaagattcagaatagaaatgtgtttagtaaacttttgatggatgaacagagtgactctgtttttaggctaaatcactaccctccatgcccagagattcaagcattgaaagaccacaacatgattggatttggagagcacacagacccacagatcatttctgtgttaagatccaacaacacttctggcctgcaaatctctcttaatgatggaagctggatttcagtcccacctgacccgagctcatttttcatcaatgttggcgactcattacaggttatgactaatgggcggtttaaaagtgtaaggcacagagtcttggccaacagtataaaggctagaatttcaatgatttattttggtggaccacctttgagagagaaaatagctccattgccctcgctcatggaaggagaagaaagcttgtacagagaatttacatggttcgagtacaagagatctgcttacaactcaagattggccgataataagcttgtcctcttcgagaggataacagcctcgtaa

SEQ ID NO: 320 - protein, 368 aa, Populus trichocarpa
MVVCVFVYIISSIFVYQLSRALSISLSSFLLQTTTTMVLVPKPALQQFSFIRNIKPTTFFSGIPLIDLSKPDSKHLLVKACEEFGFFKVVNHGVPLEFISKLESEAVKFFSLPLSEKEKASPPNPFGYGKKSIGQNGDVGWVEYLLLTTNQESVSQRLSSVFGDNPEKFRCALNDYVSAVKKMACEILEMMADGLKIQNRNVFSKLLMDEQSDSVFRLNHYPPCPEIQALKDHNMIGFGEHTDPQIISVLRSNNTSGLQISLNDGSWISVPPDPSSFFINVGDSLQVMTNGRFKSVRHRVLANSIKARISMIYFGGPPLREKIAPLPSLMEGEESLYREFTWFEYKRSAYNSRLADNKLVLFERITAS

SEQ ID NO: 321 - DNA, 999 bp, Populus trichocarpa
atggtagttccttctccaacaccaatacgaaccaaaacgacgaaggctttaggaattcctactgttgatctttctcttgacaactcgagcgtatcacagttgatcgtaagagcatgcgaagaatatggattcttcaaagttataaatcatggggtcaacaaggaggtcgtgacaagactggaggaggaagcagctcgttttttcggaaaaccagccgcggagaagcaacaggctggacctgctagtccttttggatatggttgcaagaacattggctgccatggtgacacgggcgagctcgagtatcttctcctccacaccaatcttctctccgtctctgaaagatccaaaaccatctcgaacgacccttcaggattcagttgtgcggtgagtgattacataagagcagttaggcagcttgcatgtgagattcttgatcttgcggctgagggcttgtgggtcccggataaacatgtattcagtaggctcatcagagacgtccatagcgattcagttcttagacttaatcactatcctgcagtcgaagagatcgcagattgggacccatcacctataagaattggttttggtgagcactccgaccctcagatcttgaccatcttgcgatccaacgatgttgcgggcctccaaatttgcttgcatgatggtttgtgggtacccgtccctcctgactccacaggattctacgtgattgtgggtgattcctttcaggttttaaccaatgggagatttgaaagcgtgaggcatagggtattgacaaactcgagccagccaagaatgtcaatgatgtattttggggcaccaccccttactgcatggatcgctcctctctcacacatggtttcacagcaaaatccaagcctttataaacccttcacttggagtgaattcaagaaagctgcctactctctacgtttgagagatacgcgtcttgacctcttcaagattcacgccactgaaaaatctgcttcattgtaa

SEQ ID NO: 322 - protein, 332 aa, Populus trichocarpa
MVVPSPTPIRTKTTKALGIPTVDLSLDNSSVSQLIVRACEEYGFFKVINHGVNKEVVTRLEEEAARFFGKPAAEKQQAGPASPFGYGCKNIGCHGDTGELEYLLLHTNLLSVSERSKTISNDPSGFSCAVSDYIRAVRQLACEILDLAAEGLWVPDKHVFSRLIRDVHSDSVLRLNHYPAVEEIADWDPSPIRIGFGEHSDPQILTILRSNDVAGLQICLHDGLWVPVPPDSTGFYVIVGDSFQVLTNGRFESVRHRVLTNSSQPRMSMMYFGAPPLTAWIAPLSHMVSQQNPSLYKPFTWSEFKKAAYSLRLRDTRLDLFKIHATEKSASL

SEQ ID NO: 323 - DNA, 984 bp, Pisum sativum
atggtgttactatccaaaccaacttcagaacaatacacctatgttaggaacaacatgccaatcacattttcttcatcaatccctctcgttgacctatcaaaaccagatgcaaaaaccctcatagtaaaagcttgtgaagattttggattcttcaaagttataaaccatggtatccctttggatgctatctcccaattggaatccgaggccttcaaattcttctctctccctcaaacagagaaagaaaaagcagggcctgcaaatccttttggctatggtaacaaacgtattggactcaatggtgatattggttggattgaatatcttctcctcacaaccaatcaagatcacaatttctctctttatggagaagacatacacaaatttaggggtttgttgaaagattataagtgtgcaatgaggaatatggcatgtgagatacttgatttgatggcagaagggttaaagatacaaccaaagaatgtgtttagcaagcttgtgatggataaacagagtgactgtctttttagggttaatcattaccctgcttgccctgaattagctatcaatggtgagaatttgattggctttggagaacacactgaccctcaaattatttcaattttgaggtcaaataatacttcaggctttcaaatttctcttagagatggtagctggatttcagttcctcctgatcatagctccttctttatcaatgttggtgattctcttcaggttatgactaatgggaggttcaaaagtgtgagacatagagttttggcaaatggcatagacccaaggctgtctatgatttacttttgtggaccacctttgagtgagaaaatagcaccattaccttcactcatgaaaggaaaagaaagtttgtataaagaatttacatggtttgagtacaagagttcaacttatggttcaaggttggctgataataggcttggaaattatgaaaggattgctgccacttaa

SEQ ID NO: 324 - protein, 327 aa, Pisum sativum
MVLLSKPTSEQYTYVRNNMPITFSSSIPLVDLSKPDAKTLIVKACEDFGFFKVINHGIPLDAISQLESEAFKFFSLPQTEKEKAGPANPFGYGNKRIGLNGDIGWIEYLLLTTNQDHNFSLYGEDIHKFRGLLKDYKCAMRNMACEILDLMAEGLKIQPKNVFSKLVMDKQSDCLFRVNHYPACPELAINGENLIGFGEHTDPQIISILRSNNTSGFQISLRDGSWISVPPDHSSFFINVGDSLQVMTNGRFKSVRHRVLANGIDPRLSMIYFCGPPLSEKIAPLPSLMKGKESLYKEFTWFEYKSSTYGSRLADNRLGNYERIAAT

SEQ ID NO: 325 - DNA, 1038 bp, Pisum sativum
atggtagtgccttctccaacttccatgataagaacaaagaaaacaaaggcagtaggaattccgacgatcgacctttctctcgaaaggtcgcagttgtcggaattagtagtgaaagcatgtgaagaatatggtttcttcaaggtggtgaatcatagtgtaccaaaagaggttatttctagattggatgaggaaggaatagagtttttctcaaaaaattcttcagaaaaacgtcaagctggtacttctactccttttggttatggctgcaaaaatattggtcctaatggtgataaaggtgaacttgaatatcttcttcttcattccaatcctatttcaatctctgaaagatccaaaaccatagcaaaagatcaccccataaagttcagttgcatcgtcaatgattacataaaagcagttaaagacttaacatgtgagattcttgagctagcagcagaaggattgtgggtccctgacaagtcctcactcagcaaaattatcaaagatgaacatagtgactcacttcttagaatcaatcactaccctccagttaagaaactagggaatgataattgggacccatccaaaattcagaatagcaataataataatattggttttggagaacattctgaccctcagatcttaactatcttaagatccaacaacgtgggtggtcttcagatttcaactcaccatggtttgtggatccctgtccctcctgaccccagtgaattctatgtcatggttggtgatgcccttcaggttttgacaaatggaagatttgtgagtgtgagacatagagttttgacaaacacaacaaagcctagaatgtcaatgatgtattttgcagcaccaccgttgaattggttgataagcccgttatcgaagatggtgacggcccatagcccatgtttatataggccctttacatgggcccaatacaaacaagcagcatatgctctcagattaggagatacacgtcttgatcaattcaaggttcaaaaacaagaagatagcaatgattctcattctctatga

SEQ ID NO: 326 - protein, 345 aa, Pisum sativum
MVVPSPTSMIRTKKTKAVGIPTIDLSLERSQLSELVVKACEEYGFFKVVNHSVPKEVISRLDEEGIEFFSKNSSEKRQAGTSTPFGYGCKNIGPNGDKGELEYLLLHSNPISISERSKTIAKDHPIKFSCIVNDYIKAVKDLTCEILELAAEGLWVPDKSSLSKIIKDEHSDSLLRINHYPPVKKLGNDNWDPSKIQNSNNNNIGFGEHSDPQILTILRSNNVGGLQISTHHGLWIPVPPDPSEFYVMVGDALQVLTNGRFVSVRHRVLTNTTKPRMSMMYFAAPPLNWLISPLSKMVTAHSPCLYRPFTWAQYKQAAYALRLGDTRLDQFKVQKQEDSNDSHSL

SEQ ID NO: 327 - DNA, 1014 bp, Spinacia oleracea
atggtggtgttatctcatgttgcattagaccaattcatgaaaacctgcaaaccaatagacacacacttattccctacagtaatcccaaccattgacttaaactctcctgatgttaaatccctgattgttaaagcttgtaaggaattcgggttttttaaggtggttaaccatggcgtaccaattgagatgacgaggcaattagaagatgaagcaagtaaattctttagtttgcctcaaggacttaaagaaagtgctggaaatcctaacccctttggttatggtaacaagaagattggtcgtaatggtgacgtcggttggattgagtatcttctgttatctgcttctgatgagttcatctcacagacttgtctctccatttatccggataaccctgatgttttcaggtgtgctttaaacaattacatatcaaaaatgaagaaaatgggggtgagagtgttagaaacaatggcggaagggctgaatttgaaaggagaagacaggtatgcgttgagtaatctgataaaagatagcaaaagcgactcgtatttcaggctgaatcattatccaccaaggcctgaggcgtttgaaggcatcaacggtaggaacttggttggatttggagagcatacagacccacaaatcatatctgttcttcgatcaaataaaattggaggcctccaaatctctctcaatgatggaacttgggtctctgttccacctgatgataactcctttttcatactcgttggggactctttgcaggtgatgactaatggaagatttaagagtgtgaaacacagggttttggctgacaacatgaaatcaagattatcaatgatcttctttgcgggcccacctttatgtcaaaagatagcacctttaccttgcattatgcaaaaaggagaagaaagcttgtacgaagaattcacttggtgtgaatacaaaaaatcagcttacaaatctaggttgagtgagaataggctcttacgctttgtaaagagaaatcataactaa

SEQ ID NO: 328 - protein, 337 aa, Spinacia oleracea
MVVLSHVALDQFMKTCKPIDTHLFPTVIPTIDLNSPDVKSLIVKACKEFGFFKVVNHGVPIEMTRQLEDEASKFFSLPQGLKESAGNPNPFGYGNKKIGRNGDVGWIEYLLLSASDEFISQTCLSIYPDNPDVFRCALNNYISKMKKMGVRVLETMAEGLNLKGEDRYALSNLIKDSKSDSYFRLNHYPPRPEAFEGINGRNLVGFGEHTDPQIISVLRSNKIGGLQISLNDGTWVSVPPDDNSFFILVGDSLQVMTNGRFKSVKHRVLADNMKSRLSMIFFAGPPLCQKIAPLPCIMQKGEESLYEEFTWCEYKKSAYKSRLSENRLLRFVKRNHN

SEQ ID NO: 329 - DNA, 990 bp, Spinacia oleracea
atggtggtagcttctccaaaccctctaaaaagaagcaagaaaacaaaggccatgggagttccaaccattgatctttctcttaaatatcaacaacgttctaccttaaccgacctcattgttgaagcttgtgaagacttcggaatttttaaggttgttaatcatgggatttccacggaggttatttccgcccttgaaaaccacggcctcgacttcttctcgaagccgacgccggaaaaacaccttgtcgtgggccccactgtccccaaaccctttggctatggcttccgtaacattggcaacaatggtgacgtgggtgatcttgaataccttctccttcacgctaacctctcttccacccatccacctcttttcggtgaggcggtggatgattacgtgggggcagtagcagatttatcatgtgaactcttagatctgatggctgagggtttgtgggtctctgataaaacgatctttagcaagttaatcagagacgttcaaagtgactctcttctcagattaaatcactaccctccattaaaaaacaaggattcattcatcaacggttctggagagcgtattggatttggggagcattctgaccctcagatcttaaccatcttgagatccaacgatgttggaggcctccagatttgtatgcctgatggcttgtgggtccctgttcaaccagatcctaatgccttctatgttatggtgggagatgctcttcaggtattaacaaatggaagattcggaagtgtgaaacacagggcaatggcaaacaattcaacaaccaaagcaagaatgtcaatgaacttttttggagcgccacctttgaacgccacaatttctccgatacaagaaatggtgtcacctatgaatccaaacctatataagccatttacatggggagaatataagagagcaatgcattcttcaaggctaagtgattgtcgtctaaacctattcaagagacgtattaatgaccaatga

SEQ ID NO: 330 - protein, 329 aa, Spinacia oleracea
MVVASPNPLKRSKKTKAMGVPTIDLSLKYQQRSTLTDLIVEACEDFGIFKVVNHGISTEVISALENHGLDFFSKPTPEKHLVVGPTVPKPFGYGFRNIGNNGDVGDLEYLLLHANLSSTHPPLFGEAVDDYVGAVADLSCELLDLMAEGLWVSDKTIFSKLIRDVQSDSLLRLNHYPPLKNKDSFINGSGERIGFGEHSDPQILTILRSNDVGGLQICMPDGLWVPVQPDPNAFYVMVGDALQVLTNGRFGSVKHRAMANNSTTKARMSMNFFGAPPLNATISPIQEMVSPMNPNLYKPFTWGEYKRAMHSSRLSDCRLNLFKRRINDQ

SEQ ID NO: 331 - DNA, 1128 bp, Spinacia oleracea
atggcttctaccaaggtagtggagcacctcaaggaaaatgtactttggaagcaagcaattatggaccgtaatgcaaacatatcagaccctccatttgaagagacatacaaaaacctcctcctaaaacacaatattacacccctcaccaccaccaccaccaccaccaccaccaccgcgaccatcgaagtccgtgacttacccctaatcgacttgtcccggctagtggctaccgcggccaaagagcgagaaaactgcaaaagagacatcgcgaacgcctcgagagagtgggggttcttccaagtggtgaaccacggcataccgcaccgtatgttagaggaaatgaacaaggaacaagtgaaagtgtttagggagccattcaacaagaaaaaaggggataattgtatgaatttaaggctatctcctggaagttaccgttggggttctcctacacctaattgtttatcacaattatcttggtctgaagcttttcacattcctatgaatgatatttgcagcaatgctcctaggaatattgccaatggaaatcctaatatcagcaatctatgctcaacggtgaaacaatttgccaccacagtatctgaactagccaataaattggcaaacatattggtggaaaaattggggcatgatgagctgacctttattgaggaaaaatgttcaccaaatacatgttatctaaggatgaatagatacccaccatgccctaaatattcccatgttcttggattgatgccacacacagacagtgacttcctcacaattttataccaagatcaagttggtggattgcagcttgttaaagatggaagatggatatcggttaagcctaatcccgaggctcttattgttaatattggggatctgtttcaggcttggagcaatggtgtgtataagagtgtggtgcatcgagttgttgcgaatccaaggtttgagagattttcaacagcgtactttttgtgtccatcaggtgatgctgttatacaaagttacagggagccttcaatgtataggaagtttagctttggagagtacagacaacaagttcaacaagatgttagagaatttggtcacaagattggactttcacgcttcctcatttgcaactag

SEQ ID NO: 332 - protein, 375 aa, Spinacia oleracea
MASTKVVEHLKENVLWKQAIMDRNANISDPPFEETYKNLLLKHNITPLTTTTTTTTTTATIEVRDLPLIDLSRLVATAAKERENCKRDIANASREWGFFQVVNHGIPHRMLEEMNKEQVKVFREPFNKKKGDNCMNLRLSPGSYRWGSPTPNCLSQLSWSEAFHIPMNDICSNAPRNIANGNPNISNLCSTVKQFATTVSELANKLANILVEKLGHDELTFIEEKCSPNTCYLRMNRYPPCPKYSHVLGLMPHTDSDFLTILYQDQVGGLQLVKDGRWISVKPNPEALIVNIGDLFQAWSNGVYKSVVHRVVANPRFERFSTAYFLCPSGDAVIQSYREPSMYRKFSFGEYRQQVQQDVREFGHKIGLSRFLICN

SEQ ID NO: 333 - DNA, 726 bp, Rice tungro bacilliform virus
tcctacaaaagggagtagtaatatttaatgagcttgaaggaggatatcaactctctccaaggtttattggagacctttatgctcatggttttattaaacaaataaacttcacaaccaaggttcctgaagggctaccgccaatcatagcggaaaaacttcaagactataagttccctggatcaaataccgtcttaatagaacgagagattcctcgctggaacttcaatgaaatgaaaagagaaacacagatgaggaccaacttatatatcttcaagaattatcgctgtttctatggctattcaccattaaggccatacgaacctataactcctgaagaatttgggtttgattactacagttgggaaaatatggttgatgaagacgaaggagaagttgtatacatctccaagtatactaagattatcaaagtcactaaagagcatgcatgggcttggccagaacatgatggagacacaatgtcctgcaccacatcaatagaagatgaatggatccatcgtatggacaatgcttaaagaagctttatcaaaagcaactttaagtacgaatcaataaagaaggaccagaagatataaagcgggaacatcttcacatgctaccacatggctagcatctttactttagcatctctattattgtaagagtgtataatgaccagtgtgcccctggactccagtatataaggagcaccagagtagtgtaatagat

SEQ ID NO: 334 - DNA, 165 bp, Rice tungro bacilliform virus
acgaatcaataaagaaggaccagaagatataaagctggaacatcttcacatgctaccacatggctagcatctttactttagcatctctattattgtaagagtgtataatgaccagtgtgcccctggactccagtatataaggagcaccagagtagtgtaatagat

SEQ ID NO: 335 - DNA, 2000 bp, Zea mays
ctgcaatatatacaccaaaagtattataaactgtcatatatatgaccaaaacctttttattttagaaaagtatattaatcatggtatattaatcaaagttgttgttggggctgcaaaaatcatacccttcttccacaagctgttccttgaactgcaggtactcaggaactctcagctcctcaacagcgagctcactgacgttgaccctcacatactcccagacaccaggcctagggcggatggcaagtgcaacccatggggggatgacaatcgcctcctgtaagataatagagctagaatgattaaagaaggtgcacactacaaaaggaacagtgctgtccagcgagatctgaatctgatgcaaacctgagctgccctcaggacatcctcaaaagcaccatccttgagcttctcgcgctcagcctcagggatcgcattgttgtactcggcaatgatctggtggggctgcagcataccctttccaaggtttttcagcctgcgcaaaacgatgtgccaaataacatcagactatgccagatctataaactcatcaaacatatacaatttcaagaaatagtttagacgtatgatcagcagtcagtagcgtgggaacatatgcaacatagcgaagaggcacaacagcaaattcattcgaaaaaatgaaaacaaagattcctctcttttaactgaacttctcgaaacccctttcatgcctacacatccgatctagtcagatgcctatgcgttcatgctgaacagaacgtgtcagaactaagcataaactggttagcaagcattatcgtattcgatagaccctttagtaacaagctatacattgggtaagttcagactccaatcattctgttcagaaacatcgtattgaatataaaactaaagaacacacatgcaggtgcagccagatctaacagcagtttacagtcggtactaaaaaaagcatggtgtatgtatgtatcatcagtatccagtactaggtttcgacaaaatcctggatgctaattaaatactcatcttattagggaacacaggaacattatgtctacagcattgaatgatggccacatcatgctagatctaacaatacataatatgatggaactggtcttaaaaagtcgcattcgctcaaataatacccgtagcaaaataaatgtaaacttgcagacgaagcgggggaaatgagggcagacctggtgaagacggcgacaagctcattggggtgggcagagagtgagtcgccaatgcgctccctgacgctgtggaggcggctcaggacacggtcacctgcaccttcccccattgctgtcctcttcctggatcctcaggcctgcacagcgaaaccgaaacggaagcggaagcttcagtcagcagagaaaactgaaaccgaaaaacggttcagatccgttgacataaaagctgcgatgacatcctaaaactaaaacccctccagcaagacataaacccaactgccaacaaccagtcttttaagtctcgacacacccttgacgctgcgccacgaaactatattgcaggcaagaaaccaacagaacctaactctggaaggggggaaagaaacggcagacaggagcaagacccaaaaaaaaacgactcagatcctggtactatagtcctagtacctagaccagaaagaagaaacaaccaatacaacaagaggcatacaagaactgaatcgatgaactgaaacgcttcagaggaccgaggaatggcggagaagggaggcgcctatttatacagatctgacgagagaaccgaacaaaaacacatcgatgggaaccatggagaagaaaagggctggccgcatggcaccaatggcctcggcctccaaaaagccgttgaatccaaagcaggcgaggacgaagcgtgacgcggcagggtacttctctagaaaagcacggcatcagcaaggtgggggggctggggttccttattgcaggcaatcacgaggtgattagcacaaacggaag

SEQ ID NO: 336 - DNA, 2000 bp, Oryza sativa
ctgaaatatacatcagagatattacaatgacatatatatcgataaaagaaaaataataaaattaagttttaaattttaagaatatatgtttttagtatcccaattatgcagatttcatacccttcttccacaagctgttccttgaactgcaagtactcggggactgtcagcaactcaacagcgagctcgctcacattgaccctcacatactcccagacaccgggcctcgggcggatggcaagggcaacccatggggagataacaatcccctcctgcatgataaaaaacaattacaagttaagttagagcaagcggtagagtaaagatggatctctgtgatgcaatgaaatctgaatctgattcaaacctgtgcactcctcaggacatcctcaaaagcaccgtccttcagcttctcacgatcagcctcagagattgcgttgttgtactcagcaatgatctggtgggcctgaagcattccctttccgaggttaaccagcctgcgcaaataacagtgtcaacaaaaatatcaggccagatctatcaactcagcctataaatatctcaataagataattttagcacttgagcatttgcgcataataagaaaatttgctattagccacttaaaaagaccatatatgatctgtttgcattgagatgaattaaaaatttcattgtagatatgaaatgattagttttgaccatttaattggacttaatgaaatatgcgcgataatcagatctacgcgctcgcgccaatagatctagtaagatgtaggttttttattttttttgtgaaactttgctaccacaacaagcatctgtaccagtgcagaattcattacttgtattcagtttgtaaaccgtatatataatataaataacatgcacatgcagtcagatctagcactaccagtccacagtaatccaaaactacatttgtatatttcatcattattcagtagtactaggtttgtacaaaatcttggctgcagaaggccgcacttaaatattcattctaatcagaaacttaaaaaaaaagtgactacaaaatgattgcatccaattcagtaaatatgagccattcctggccagatctaacaatctcaacaacaaagatcctatatgaacatctccttctaaaagaaaatacagtaacatctgaaggcagtagactagaaaccaacaaaatctaatgctgggaaatcactaaatcagcacgaacctggtgaagacggcgacgagctcattggggtgggcggagagggagtcgccgatgcgctccctgacgctgtggaggcggctcaggacgcggtcgccggcagcttcccccattgctctcctcttcctcttggctcctcaagcctgcgtgcacaaccaaccaccatcatcagatacatccagacccagtcaacacaatcactccaggaaaaaaaaaagtcaagccataaaccccaaccaaaaaccacgcctttgacaaacactggaagaaaaagaaaatcgcagctttttcacaagcaatctagaagaaaagaaaaagaaaagactacatagcagctataattgactgagaagcatacaggaatcaaacaatggagaaggggagggaggaagaacaatgatgctccaggctgaggaccgaggaactgggtgaagcggggtaggcgcgtatttatgcagatctgaggagagaaaccaccaaaacaatccgatggtttcaacgaaaaagatcgtcgcttcttgctgcaccagctcacccatagccgttgagatcgaagctaagctagcagcagcaaagctggaacgaagagtgacgcattcaagctcctctcctctcctctcctctcctccggagcacgaggccagcatgggatggattggggtttcttgttggccatggcaaaggaggaggtcattaacgttgacacggcgtaatttaattaaatcttatcttaaaatatgatttaagtggtagtaacaaggaagattaatactatgaa

SEQ ID NO: 337 - DNA, 2000 bp, Oryza sativa
gctgtttaagaaaaacagaagtaaaattcagtcactgttattttgcttcagttataatctgcaaatcgtcgttctggtacttactgtccatcaacaagctgttccttgaatgccaagtactcagaaacactcagctcttccactgccaactcacttacattcacccgaatgtagtcccagacaccaggccttggcctgatggccagtgcaacccagggcggcagcacaatggcttcctacatacagtcaaggaagtaagttagaaagactggtatttgactttgagttgactatcataaccatcctggctcattgccaaatttacctgagcagcccggagaatgtcttcaaagggagcatatttctctttgtcagcttcgatcaaggcatcgaactccgcaagcagctggtgacgctggagcattccctttccctggttaacatacctgcatagagtgatatttaagaaatagaaccaatgcttagatctcacatcctttctgcggctgaactatgttaatggcactaccacataaacctgatttttacttcttatttttaagaccacatgatctgtacttaatctagctatgaacaaacaatatttcaacatcatctaagattcatgactcaagacaaaaatgttagagctcatcacagattattatagataccatcattaaaactaaagagatgcataaccttgtcagctaagaatttgtaacatactaacatgttatcgtttcacatctgggttgactaagaactaaccaactgtatggataaaatcattgaaaactcaaaacaattagtagcaggttccaagaagacacaagatattatattgagatcttcacctagagaagagtgcaatcaactcattgggatgagacgagaaggtggcaccgaggcgttcgcggagactgtggaggcgagctagcttggcagccatgactcaatttcaggaactgcaaagaaaggttacacttagcaacacgtaccaaaaccactcacttgcacaagaataattagtcaacagccatcactaagcattgcaagactatctctgaacaggaaagccatgctaaatcaacactaataacatcacacaaaagcattggaagatcaaaacataactaaaaacagctgtttcatctacacaactgaaagcatctatggtttacgaagcagagtgcgagtactgattcaaaataaatcaacctgaaccaatatactctgacaatgttttcaaagggataaaagaaccagctttatcaaatggatttgttgggttttagtaagtatcattgagataccgatggcatatctcaaactttgcaaaattataatggcatggttccaaattaccctttagtattagcaccagttagatcctaattcctaaatccgataggacagagcgaaagatccctggagatatgaagatttggctacagattaagcagagccaacatgaagttccgaatattatgaatccgcaagcggggagatcaaagagaagaatacggaaggtcgcgactccatgaaagaatccaaccaaaaacccaaagatttttctcagttcaaaaaaaaaaaacccttcatttttggttcgccatccaccgacaggcaccaagacattcctcaggaagcaaaaaagattaagcagaacaagtgataagcaagacacagtatcaacggactacgagtcgagaaaatcactgaggcgcgattcttactgcaccaagtaaaaaaaaatttgggggcaaaaagaactctgcaatggggcggagcaacgtggcagcaaaactaaaggtcgaggatttgaggttttttgccggttttcctcgaaaccccgaatccgctcatagtaaacccactaaactgcagcagaaacccccctcttggttcagatttaccgaaagcagtaaacccaagaacatgtcagcaaaaactcctgcaagattcagctgacgacccaccaaagaatcgcaagaaat

SEQ ID NO: 338 - DNA, 2000 bp, Oryza sativa
tggcggacgcgccacgcacaaacacaaacctgcacacccctgtgtcagaggaggagaggccaagaaaggaaatcgagtggaggaagtgaggagcggcggagacgtaggaggaggagggggagatggaaatggaaagccgcgcgagagaggaggcgcgtgctggatgggaggaggaggaggaggtggtgggtttgtgtttggagagacgagcgagagaggcgaagcatttaaagggaggaagagggggagagagagagagagagagagagagagagagagagagagagaaaggaggaatataataaagggtggtgcacctgccaactgctatgctcaccaacactttgtacacacccagttacacccccctgcctttattatttccagtgcagtaataacttcaacaattattgaaatgaaaatggaattaatggagttagtatcggattagcgacacgcttgccgagcttctagacggtgcgattatttcagcgggaacgactttctgtaggtgaatttaatagaggagtgttttaaatccactcgacgttgtaatagctggtttaattcgtttgtactgtcgagtagttatccaaaatcaattttggatatttaaaagaaaaaaaaacagatccgaagtattggacctactggcaaataggaattttgctatatataggtgtgcgttcatttataatggagtagcatggagttttattaatccagtaaatgttttcattgatttaattaatataacgaatttcgcttgaggccatatttgttaaacgcttttatctctatcatcattcatcctaccagtaaagagcaccggagatcgcacttcatttaaatatatgtccatgttggataaaccatagtttattatagtgttcttttatatgttttgtggggaatttagattgtttaatatggcatacatatccatccatcattattatattctaacacaactggataagtgttctaaactattgtagaataactttgtagtatgatcgatcttgtggaataaaaaaagtctgacaataacctttcataaaggaatatgaatacccgtaatcaacgcatcaaatcattcacggtgtacgcctagcgaattcgttggcgagtgctcgtgcggccgtgggctcgctgtgatgcatgcatggctctctggctacgtcgagatagcgattagtagcaaaattaagcaagccacttattaattaatctttggagatatcatatgattaaggcattaattcgtacgtactcgtcgtcagcgttttctgcaaagtccactacagttttttctttctttgctgaaaatgctgatgtgttggagatggagtgacgtgcacaacctgccgccacgtggatggttgctggagcctacgtgtcatcttaatttgaacaaaaaaaaaagaggaataatacatcaatacattttcgaatttcagttctgccattgaccagtaatacacatgtcggcctcacattttaccctgatcttagtaacgggtggtcgcctggtcggtcactgaaaaaagttcaggaaattatagtcaaactgaaacgaacatattcactccttaaaaaaactaaatctttttatatatttgtgatattgtaaaatagctacgggataatgatatagatatatatagtgataagggatagatggatcgagatatggagttgtgctttctttaatttccactacttgggctaccatattatggtagttggtatgaaaagatacacagcagtatagtgatgtgatcaatgacatgtatatctcacatgctcccatgttggagtcaaattttgctagactaaaatccaattccaagcagtccctagccaagaacaaacaaaattcagtgaggtcactgctgcaccaaggactgcatgcatgcaggagaagggcattttctcttttttcttttggagactcgattcaattcggtcggtcggtcgcaatggtcagcttaattaaa

SEQ ID NO: 339 - DNA, 2000 bp, Oryza sativa
tgtgaaaggtggcggcaccagcttagccgcagcttctctcgtcgtctccctgaaacgagagggaggaagttggtagcgtgatatatttaggcatgtcatctcttgtataagaagtcttatctgtgctaattcacacggttctctaatctctctccattctgtttttgtaaattggttcagtagatagcgtagggttatgcttatatatactccgtgaagtatatatttaaaaattagtcacacgtaaagtactatacatgttttatcgtctaataacaataaaaacactaatcataaaatttttttaaataatacgaatggttaaacgttgaatatgaaccgtgcaaaactatatttattttgtaacagagaaaatatttcacattaattagattgttgttttatggaaggttggagagctgcgccgccgttgcgcagacctaggaggctgcttataagttataatcaatcaattcacggatgccggctgggacgcggcccatcgtccgggaagacgacaactcaacgcaaaaagccgatatgcctccaaattgccattgccacctctacggctgtttatactgctccaaatcaaaagcgtccatggaagaatctagtatttcccgcaaagacgatgatgatatgcaggattggatatatagggggttgttgcatgattgctagaactcccgtttccgaagttgttcgtccatttttaaagctgccaaataggaatttattttgttttcaagtgtaatagagttctgtccagatgagtgaattataatttggttcacattttatttgctaagtttcagtttgaacattctcaaataacttttttcttcactttttaaccgagtaacttagttattttttccgtttggaccacccaacaatttgttgctaagtgcatctcacccgtcaaataattcctttgaatccaaattcaattatatcccaaaaataaaaaacttctgaattccacatcaattcaaaccccaaccattttaatttctctccatattttccatttctctatttttacctttctcttttttccatctatttatttttttccttttctatttctttctttctccttcctttctctgtttccttcttcttctcctcggctaggcccgagccagcccgtgccgcctcgcgccaaccctgtgccgccttacgccgcgcttgcgtgcgctcgcgcccacctcgtgcccaacccgcgcacgccacacgcacacacgaggacgatcgacggacgaatgcaatcatatccccttccttactcagctagaaggctcaagaaccgcaactttgatctcttccaccctctcaaatccgccccaacccctgctgactcaatcgccattaccggaggaaaaatccccgaaaccctattaccggcgccactaacagagctccaaaattcgtcgcataattcgaaaatattctgaaattgaaggtaaaaatggaatctacatgcgaagtactccctttcccctccaatccgtcactggaacgccgccggcgccgcctcccgctgccactgccctgtttggccgccgacagccgcacggcgcgccgctgctccaggccgccctagcttcaaccaccgccacctttggctccgcctccctcctcttatgctcaccaagcccgcctccctcgccggagatcgccggaaccaccgccgccatggccgccaccgcctcctgcttctggccgccgccgccagcctcgccaccggcgcctatgccaccgccgaccacggaaacggagtccctacaccttggggaccacaaaaccggcggcatccctcccaaaaccggcctcctccaccgccggcgttcgtgggattccggccagttctgtgcagagcgagagaagaagaggaaaaatagattttcctattgaaagataaatcagaaaattcctttttcttttcctatcaagttgaccatccgtttgacctcaaaatcaaaatctgagaccta

SEQ ID NO: 340 - DNA, 786 bp, Zea mays
gacatggaggtggaaggcctgacgtagatagagaagatgctcttagctttcattgtctttcttttgtagtcatctgatttacctctctcgtttatacaactggttttttaaacactccttaacttttcaaattgtctctttctttaccctagactagataattttaatggtgattttgctaatgtggcgccatgttagatagaggtaaaatgaactagttaaaagctcagagtgataaatcaggctctcaaaaattcataaactgttttttaaatatccaaatatttttacatggaaaataataaaatttagtttagtattaaaaaattcagttgaatatagttttgtcttcaaaaattatgaaactgatcttaattatttttccttaaaaccgtgctctatctttgatgtctagtttgagacgattatataattttttttgtgcttaactacgacgagctgaagtacgtagaaatactagtggagtcgtgccgcgtgtgcctgtagccactcgtacgctacagcccaagcgctagagcccaagaggccggaggtggaaggcgtcgcggcactatagccactcgccgcaagagcccaagagaccggagctggaaggatgagggtctgggtgttcacgaattgcctggaggcaggaggctcgtcgtccggagccacaggcgtggagacgtccgggataaggtgagcagccgctgcgataggggcgcgtgtgaaccccgtcgcgccccacggatggtataagaataaaggcattccgcgtgcaggatt

SEQ ID NO: 341 - DNA, 1160 bp, Zea mays
atgtgctggtgccccataaggtaggcacctaggtctgtgtttgaagcatcgacagatttgtaaacatgttcctatgaacctatttctgattgataatttgtcaaaactcatcatttgtcttcatccttgcctgcttgcgttcacgtgacaaagtacgtgtatgtcttcggcctttgctgtgtatgtttcgcattgcttagatgtggtgaaagaacatcagaagatgcattgatggcgtgcttaaaccagtgatgtgctccaggtgttcctgcagtctgcagagatatttactcttgtagtcttgttgacagcacagttgtatgtgatttcttggatgtaatgtaaaccaaatgaaagataggaacagttcgtcctcttccgtatacgaaggtcactgtatcatttgtcgtggcacaagatgatctgcaggcaggactgcaacatggtttcttggactgtcctgaatgcccgttcttgttctttagttgagccagagcagcagcctggtgtcggtgcctgagacctgacgaagcacacggcaaacaaacaagtcgcagcagctagcaggggcgttgccatcgccacaagcccccaagagacccgccgaggaaaagaaaaaaaaactacggccgccgttgccaagccgagcgtgcgaaccgatccacggatgggagatcagagatcacccaccgcaggcgggcggcagtggctggcgaggtgcgtccacagaacctgctgcaggtccctgtccgtcccggcgaccccttttctaggcgagcaactccccatggcagagctgcacgcagcagggcccgtcgttggttgcagctttaaccctttttgttttaaccatacaatgcagagtcgcagaggtgaaacaggacggaaattacagaaaagatggtggtgtgccagcagccccagcatgaagaagatcaggacaaaagaaaagcttgtgattggtgacagcaacaggattggattggagccaagctaggcagtgagaggcaggcagcaagacgcgtcagccactgaaatccagagggcaacctcggcctcacaactcatatccccttgtgctgttgcgcgccgtggttagccaggtgtgctgcaggcctcctccttgtttatatatgggagatgctctcaccctctaaggt

SEQ ID NO: 342 - DNA, 1532 bp, Oryza sativa
tagtcctctaatatatgaaattttgatataggtaaagaagggtattgcaaggataagaatgtaaaaagaaataagagtaatccttaccgataatagtattccttctctaccgttaaaagttaaacctgtgcgtgtagcattttaatccaggatctatcgaatccgtccctcgttggcgtgggcgacgaacacgtgcagaagaagctttccccagaaagcacctcaccgcctcgccgtctggcagactggcacgcggggccctaccctcgctgcgcctgggcccgtccgccttctgcacactgtcacgcccccacccgctcgccgcctcgcgcctctctctccgcctccgccgcggccgcccgacgtgatagcgacacgtaggactcgccaaacacaaaaaatccatcgcgatttttggaattttgttacaaaccaaatcccgcattagagatttaatttgatttaatttaattacgtaggagtaccagataaggagatcgagttaaaaaagctaacggcgcggcgtggttatctccgaatcggctgtggctccccgcgtcggcgtcggcgcggcggcggcgcgccggccgaaccctggccgtcggatcgggcgtcgtcctgggccccacgcgccacgggcggctgtcgtttgctcctcggagcggggtgggcccaccatggccaccaccacaggtcgcggtcgcggctgacctggcggtggtcccgtgctcgcggtgttttttttttttcactctctttctctcggtggacagtagcgggggccgcggcccgcgggggcagagattgcaaaaacagcggaaacggaagattgcaaaattgcaactgctttcctgtttttaattcgggatcaaaaagattctttcgtcggggtccccgtgccattgttgtattgcgcgtaggtccttgcttgtaaaagataatctccttaattttttctttgtactactagtgtatatgcagtaagaatataccatgagtaaaatgaaccacaaaactaattacgatataccattctcatgtagacgttctcttttcttttgctagtcatacgtgcatatataaccaaacaaaaaaatgtttgaagtactcctatccaatttattactccagtagacaacaaaagaaaatgtttgaagtaataactgatccatggtacagtagggttgtcgtcaatcttgtgtttctttcattccattgtacttacaatcgtactccagctagcacagcacaatgggcttaagctttggaccccaaattctgatcttgtcggggacccgtacgaaaatactcccgtagagatgcagataccgtcacaacctacaaccaacgaatgttaagaaaacaaagggaaaaaaaaagaggcgaattcggaggagaaaaaacggtggctaaaatatagtgcgggtgtggggacgcgacgcgagcgacgaaagaggagagaggatgggttggcctgcccccccctcccctgtctataaatgcagaggcgccgagtgccctagtcgccgctc

SEQ ID NO: 343 - DNA, 841 bp, Oryza sativa
tcgaggtcattcatatgcttgagaagagagtcgggatagtccaaaataaaacaaaggtaagattacctggtcaaaagtgaaaacatcagttaaaaggtggtataaagtaaaatatcggtaataaaaggtggcccaaagtgaaatttactcttttctactattataaaaattgaggatgtttttgtcggtactttgatacgtcatttttgtatgaattggtttttaagtttattcgcttttggaaatgcatatctgtatttgagtcgggttttaagttcgtttgcttttgtaaatacagagggatttgtataagaaatatctttagaaaaacccatatgctaatttgacataatttttgagaaaaatatatattcaggcgaattctcacaatgaacaataataagattaaaatagctttcccccgttgcagcgcatgggtattttttctagtaaaaataaaagataaacttagactcaaaacatttacaaaaacaacccctaaagttcctaaagcccaaagtgctatccacgatccatagcaagcccagcccaacccaacccaacccaacccaccccagtccagccaactggacaatagtctccacacccccccactatcaccgtgagttgtccgcacgcaccgcacgtctcgcagccaaaaaaaaaaagaaagaaaaaaaagaaaaagaaaaaacagcaggtgggtccgggtcgtgggggccggaaacgcgaggaggatcgcgagccagcgacgaggccggccctccctccgcttccaaagaaacgccccccatcgccactatatacatacccccccctctcctcccatccccccaaccct

SEQ ID NO: 344 - DNA, 1392 bp, Oryza sativa
ctcgaggtcattcatatgcttgagaagagagtcgggatagtccaaaataaaacaaaggtaagattacctggtcaaaagtgaaaacatcagttaaaaggtggtataagtaaaatatcggtaataaaaggtggcccaaagtgaaatttactcttttctactattataaaaattgaggatgttttgtcggtactttgatacgtcatttttgtatgaattggtttttaagtttattcgcgattttggaaatgcatatctgtatttgagtcgggttttaagttcgtttgcttttgtaaatacagagggatttgtataagaaatatctttaaaaaaacccatatgctaatttgacataatttttgagaaaaatatatattcaggcgaattctcacaatgaacaataataagattaaaatagcttgcccccgttgcagcgatgggtattttttctagtaaaataaaagataaacttagactcaaaacatttacaaaaacaacccctaaagtcctaaagcccaaagtgctatgcacgatccatagcaagcccagcccaacccaacccaacccaacccaccccagtgcagccaactggcaaatagtctccacaccccggcactatcaccgtgagttgtccgcaccaccgcacgtctcgcagccaaaaaaaaaaaaagaaagaaaaaaaagaaaaagaaaaaacagcaggtgggtccgggtcgtgggggccggaaaagcgaggaggatcgcgagcagcgacgaggccggccctccctccgcttccaaagaaacgccccccatcgccactatatacatacccccccctctcctcccatccccccaaccctaccaccaccaccaccaccacctcctcccccctcgctgccggacgacgagctcctcccccctccccctccgccgccgccggtaaccaccccgcgtccctctcctctttctttctccgttttttttttccgtctcgtctcgatctttggccttggtagtttgggggcgagaggcggcttcgtcgcccagatcggtgcgcgggaggggcgggatctcgcggctgggtctcggcgtgcggccggatcctcgcggggaatggggctctcggatgtagatctgatccgccgttgttgggggagatgatggggcgtttaaaatttcgccatgctaaacaagatcaggaagaggggaaaagggcactatggtttatatttttatatatttctgctgctgctcgtcaggcttagatgtgctagatctttctttcttctttttgtgggtagaatttgaatccctcagcattgttcatcggtagtttttcttttcatgatttgtgacaaatgcagcctcgtgcggagcttttttgtaggtagaagatggctgacgccgaggata

SEQ ID NO: 345 - DNA, 743 bp, Oryza sativa
gaattcccggacctccatgcctacatcaactaatttgattccttgagtttacgtttagtgatatgtctatttttagagcttgttggggcttcggcctcagctctagccagccaaacatgttctaccaagtaccctatgttggcatgatatagtgatgcattataacaataaatgagcgagggattgctggctgaaaaagctatactagctgcatttggttatagttaaccgaactattaattgcgtgtacaacaaaataaaaaaaatgcatgttgcacattctttcattaacattatgttttggtagtgtgaattagaaatttgattgacagtagatcgacaaacatagtttcaatatgcttaagttagttatgactttaacatatcagtctccttgatattttcgttttagattcgtctctctactagtgtgtatgtccaccttccatagcagtgaagggttccattccatccctggtaaaaaaaaatcaaccactactatttatttcctaaaaagcaaaatgataaaatatcatttttttaataaaaataaaaaaattttggggtacataattgatgttgccccttgggattaaccttaaaaaagggcgaattttctagggtttggccaagttttgcaatgcaccaaattattccccttgggccggccgccaccccaaaaaaaaccccaacccccaactttccattgaaggccgggcccccttaaatcctcatccccccaa

SEQ ID NO: 346 - DNA, 144 bp, Oryza sativa
taaaaaagggcgaattttctagggtttggccaagttttgcaatgcaccaaattattccccttgggccggccgccaccccaaaaaaaaccccaacccccaactttccattgaaggccgggcccccttaaatcctcatccccccaa

SEQ ID NO: 347 - DNA, 612 bp, Cauliflower mosaic virus
ggtccgattgagacttttcaacaaagggtaatatccggaaacctcctcggattccattgcccagctatctgtcactttattgtgaagatagtggaaaaggaaggtggctcctacaaatgccatcattgcgataaaggaaaggccatcgttgaagatgcctctgccgacagtggtcccaaagatggacccccacccacgaggagcatcgtggaaaaagaagacgttccaaccacgtcttcaaagcaagtggattgatgtgatggtccgattgagacttttcaacaaagggtaatatccggaaacctcctcggattccattgcccagctatctgtcactttattgtgaagatagtggaaaaggaaggtggctcctacaaatgccatcattgcgataaaggaaaggccatcgttgaagatgcctctgccgacagtggtcccaaagatggacccccacccacgaggagcatcgtggaaaaagaagacgttccaaccacgtcttcaaagcaagtggattgatgtgatatctccactgacgtaagggatgacgcacaatcccactatccttcgcaagacccttcctctatataaggaagttcatttcatttggagagg

SEQ ID NO: 348 - DNA, 837 bp, Coix lacryma-jobi
agcagactcgcattatcgatggagctctaccaaactggccctaggcattaacctaccatggatcacatcgtaaaaaaaaaaccctaccatggatcctatctgttttctttttgccctgaaagagtgaagtcatcatcatatttaccatggcgcgcgtaggagcgcttcgtcgaagacccataggggggcggtactcgcaccgtggttgtttcctgttatgtaatatcggatgggggagcagtcggctaggttggtcccatcggtactggtcgtcccctagtgcgctagatgcgcgatgtttgtcctcaaaaactcttttcttcttaataacaatcatacgcaaattttttgcgtattcgagaaaaaaagaagattctatctgttttttttttgaaatggctccaatttataggaggagcccgtttaacggcgtcgacaaatctaacggacaccaaccagcgaatgagcgaacccaccagcgccaagctagccaagcgaagcagacggccgagacgctgacacccttgccttggcgcggcatctccgtcgctggctcgctggctctggccccttcgcgagagttccggtccacctccacctgtgtcggtttccaactccgttccgccttcgcgtgggacttgttccgttcatccgttggcggcatccggaaattgcgtggcgtagagcacggggccctcctctcacacggcacggaaccgtcacgagctcacggcaccggcagcacggcggggattccttccccaccaccgctccttccctttcccttcctcgcccgccatcataaatagccacccctcccagcttccttcgccacat

SEQ ID NO: 349 - DNA, 947 bp, Oryza sativa
aatccgaaaagtttctgcaccgttttcacgtcctaactaacaatatagggaacgtgtgctaaatataaaatgagaccttatatatgtagcgctgataactagaactatgtaagaaaaactcatccacctactttagtggcaatcgggctaaataaaaaagagtcgctacactagtttcgttttccttagtaattaagtgggaaaatgaaatcattattgcttagaatatacgttcacatctctgtcatgaagttaaattattcgaggtagccataattgtcatcaaactcttcttgaataaaaaaatctttctagctgaactcaatgggtaaagagagatatttttttttaaaaaaaaatagaatgaagatattctgaacgtatcggcaaagatttaaacatataattatataattttatagtttgtgcattcgttatatcgcacgtcattaaggacatgtcttactccatctcaatttttatttagtaattaaagacaattgacttatttttattatttatcttttttcgattagatgcaaggtacttacgcacacactttgtgctcatgtgcatgtgtgagtgcacctcctcaatacacgttcaactagcgacacatctccaatatcactcgcctatttaatacatttaggtagcaatatctgaattcaagcactccaccatcaccagaccacttttaataatatctaaaatacaaaaaataattttacagaatagcatgaaaagtatgaaacgaactatttaggtttttcacatacaaaaaaaaaaagaattttgctcgtgcgcgagcgccaatctcccatattgggcacacaggcaacaacagagtggctgcccacagaacaacccacaaaaaacgatgatctaacggaggacagcaagtccgcaacaaccttttaacagcaggctttgcggccaggagagag

SEQ ID NO: 350 - DNA, 721 bp, Mirabilis mosaic caulimovirus
tggagattcagaaaaatctccatcaacaaataatccaagtaaggattaatggattgatcaacatccttaccgctatgggtaagattgatgaaaagtcaaaaacaaaaatcaattatgcacaccagcatgtgttgatcaccagctattgtgggacaccaatttcgtccacagacatcaacatcttatcgtcctttgaagataagataataatgttgaagataagagtgggagccaccactaaaacattgctttgtcaaaagctaaaaaagatgatgcccgacagccacttgtgtgaagcatgtgaagccggtccctccactaagaaaattagtgaagcatcttccagtggtccctccactcacagctcaatcagtgagcaacaggacgaaggaaatgacgtaagccatgacgtctaatcccacaagaatttccttatataaggaacacaaatcagaaggaagagatcaatcgaaatcaaaatcggaatcgaaatcaaaatcggaatcgaaatctctcatctctctctaccttctctctaaaaaacacttagatgtgtgagtaatcacccacttggggttgtaatatgtagtagtaaataagggaaccttagggtataccattgttgtaatattattttcagtatcaataaaataatctttcagtttatcttatattcatttgtgtgacaccgtattcccataaaaccgatcctaatctctcc

SEQ ID NO: 351 - DNA, 352 bp, Peanut chlorotic streak caulimovirus
acagagggatttctctgaagatcatgtttgccagctatgcgaacaatcatcgggagatcttgagccaatcaaagaggagtgatgtagacctaaagcaataatggagccatgacgtaagggcttacgccattacgaaataattaaaggctgatgtgacctgtcggtctctcagaacctttactttttatatttggcgtgtatttttaaatttccacggcaatgacgatgtgacctgtgcatccgctttgcctataaataagttttagtttgtattgatcgacacgatcgagaagacacggccatttggacgatcatttgagagtctaaaagaacgagtcttgtaatatgtttt

1. A recombinant DNA construct comprising a transcribable DNA sequence encoding a GA2 oxidase protein and a plant-expressible promoter, wherein the transcribable DNA sequence is operably linked to the plant-expressible promoter.

2. The recombinant DNA construct of claim 1, wherein the GA2 oxidase protein is, or comprises an amino acid sequence that is, at least 80%, at least 85%, at least 90%, at least 95%, at least 96%, at least 97%, at least 98%, at least 99%, at least 99.5%, or 100% identical to one or more of SEQ ID NOs: 2, 4, 6, 8, 10, 12, 14, 16, 18, 20, 22, 24, 26; 28, 30, 32, 34, 36, 38, 40, 42, 44, 46; 48, 50, 52, 54, 56, 58, 60, 62; 64, 66, 68, 70, 72, 74, 76, 78, 80, 82, 84, 86, 88, 90, 92, 94; 96, 98, 100, 102, 104, 106, 108, 110, 112, 114, 116, 118, 120, 122, 124; 126, 128, 130, 132, 134, 136, 138, 140, 142, 144, 146; 148, 150, 152, 154, 156, 158, 160, 162, 164, 166, 168, 170, 172, 174, 176, 178; 180, 182, 184, 186, 188, 190, 192, 194, 196, 198, 200, 202, 204, 206, 208; 210, 212, 214, 216, 218, 220, 222, 224, 226, 228, 230, 232, 234, 236, 238; 240, 242, 244, 246, 248, 250, 252; 254, 256, 258, 260, 262, 264, 266; 268, 270, 272, 274, 276, 278, 280, 282, 284; 286, 288, 290, 292; 294, 296, 298, 300, 302, 304, 306, 308; 310, 312, 314, 316, 318, 320, 322; 324, 326; 328, 330 and/or 332.

3. The recombinant DNA construct of claim 1, wherein the transcribable DNA sequence is, or comprises a sequence that is, at least 80%, at least 85%, at least 90%, at least 95%, at least 96%, at least 97%, at least 98%, at least 99%, at least 99.5%, or 100% identical to one or more of SEQ ID NOs: 1, 3, 5, 7, 9, 11, 13, 15, 17, 19, 21, 23 25; 27, 29, 31, 33, 35, 37, 39, 41, 43, 45; 47, 49, 51, 53, 55, 57, 59, 61; 63, 65, 67, 69, 71, 73, 75, 77, 79, 81, 83, 85, 87, 89, 91, 93; 95, 97, 99, 101, 103, 105, 107, 109, 111, 113, 115, 117, 119, 121, 123; 125, 127, 129, 131, 133, 135, 137, 139, 141, 143, 145; 147, 149, 151, 153, 155, 157, 159, 161, 163, 165, 167, 169, 171, 173, 175, 177; 179, 181, 183, 185, 187, 189, 191, 193, 195, 197, 199, 201, 203, 205, 207; 209, 211, 213, 215, 217, 219, 221, 223, 225, 227, 229, 231, 233, 235, 237; 239, 241, 243, 245, 247, 249, 251; 253, 255, 257, 259, 261, 263, 265; 267, 269, 271, 273, 275, 277, 279, 281, 283; 285, 287, 289, 291; 293, 295, 297, 299, 301, 303, 305, 307; 309, 311, 313, 315, 317, 319, 321; 323, 325; 327, 329 and/or 331.

4.-35. (canceled)

36. The recombinant DNA construct of claim 1, wherein the plant-expressible promoter is a vascular promoter.

37. The recombinant DNA construct of claim 36, wherein the vascular promoter comprises one of the following: a sucrose synthase promoter, a sucrose transporter promoter, a corn sucrose synthase-1 (Sh1) promoter, Commelina yellow mottle virus (CoYMV) promoter, a wheat dwarf geminivirus (WDV) large intergenic region (LIR) promoter, a maize streak geminivirus 15 (MSV) coat protein (CP) promoter, a rice yellow stripe 1 (YS1)-like promoter, or a rice yellow stripe 2 (OsYSL2) promoter.

38. The recombinant DNA construct of claim 36, wherein the vascular promoter comprises a DNA sequence that is at least 80%, at least 85%, at least 90%, at least 95%, at least 96%, at least 97%, at least 98%, at least 99%, at least 99.5% or 100% identical to one or more of SEQ ID NOs: 335, 336, 337, 338, 339, or a functional portion thereof.

39. The recombinant DNA construct of claim 1, wherein the plant-expressible promoter is a rice tungro bacilliform virus (RTBV) promoter.

40. The recombinant DNA construct of claim 39, wherein the plant-expressible promoter comprises a DNA sequence that is at least 80%, at least 85%, at least 90%, at least 95%, at least 96%, at least 97%, at least 98%, at least 99%, at least 99.5% or 100% identical to one or more of SEQ ID NOs: 333, 334, or a functional portion thereof.

41. The recombinant DNA construct of claim 1, wherein the plant-expressible promoter is a leaf promoter.

42. The recombinant DNA construct of claim 41, wherein the leaf promoter comprises one of the following: a ribulose biphosphate carboxylase (RuBisCO) promoter, a pyruvate phosphate dikinase (PPDK) promoter, a fructose 1,6 bisphosphate adolase (FDA)promoter, a Nadh Gogat promoter, a chlorophyll a/b binding protein gene promoter, a phosphoenolpyruvate carboxylase (PEPC) promoter, or a Myb gene promoter.

43. The recombinant DNA construct of claim 41, wherein the leaf promoter comprises a DNA sequence that is at least 80%, at least 85%, at least 90%, at least 95%, at least 96%, at least 97%, at least 98%, at least 99%, at least 99.5% or 100% identical to one or more of SEQ ID NOs: 340, 341, 342, or a functional portion thereof.

44. The recombinant DNA construct of claim 1, wherein the plant-expressible promoter is a constitutive promoter.

45. The recombinant DNA construct of claim 44, wherein the constitutive promoter is selected from the group consisting of: an actin promoter, a CaMV 35S promoter, a CaMV 19S promoter, a plant ubiquitin promoter, a plant Gos2 promoter, a FMV promoter, a CMV promoter, a MMV promoter, a PCLSV promoter, an Emu promoter, a tubulin promoter, a nopaline synthase (nos) promoter, an octopine synthase (ocs) promoter, a mannopine synthase (mas) promoter, a maize alcohol dehydrogenase (Adh1) promoter, and a functional portion thereof.

46. The recombinant DNA construct of claim 44, wherein
the constitutive promoter comprises a DNA sequence that is at least 80%, at least 85%, at least 90%, at least 95%, at least 96%, at least 97%, at least 98%, at least 99%, at least 99.5% or 100% identical to one or more of SEQ ID NOs: 343, 344, 345, 346, 347, 348, 349, 350, 351, or a functional portion thereof.

47. A DNA molecule or vector comprising the recombinant DNA construct of claim 1.

48. A transgenic corn plant, plant part or plant cell comprising the recombinant DNA construct of claim 1 stably integrated into the genome of the transgenic corn plant, plant part or plant cell.

49. The transgenic corn plant of claim 48, wherein the transgenic corn plant has one or more of the following traits relative to a control plant: shorter plant height, increased stalk/stem diameter, improved lodging resistance, reduced green snap, deeper roots, increased leaf area, earlier canopy closure, higher stomatal conductance, lower ear height, increased foliar water content, improved drought tolerance, improved nitrogen use efficiency, reduced anthocyanin content and area in leaves under normal or nitrogen-limiting or water-limiting stress conditions, increased ear weight, increased harvest index, increased yield, increased seed number, increased seed weight, and/or increased prolificacy.

50. The transgenic corn plant of claim 49, wherein the transgenic corn plant has a shorter plant height and/or improved lodging resistance.

51. The transgenic corn plant of claim 48, wherein the height of the transgenic corn plant is at least 10%, at least 20%, at least 25%, at least 30%, at least 35%, or at least 40% shorter than a wild-type control plant.

52. The transgenic corn plant of claim 48, wherein the stalk or stem diameter of the transgenic corn plant at one or more stem internodes is at least 5%, at least 10%, at least 15%, at least 20%, at least 25%, at least 30%, at least 35%, or at least 40% greater than the stalk or stem diameter at the same one or more internodes of a wildtype control plant.

53. The transgenic corn plant of claim 48, wherein the stalk or stem diameter of the transgenic corn plant at one or more of the first, second, third, and/or fourth internode below the ear is at least 5%, at least 10%, at least 15%, at least 20%, at least 25%, at least 30%, at least 35%, or at least 40% greater than the same internode of a wild-type control plant.

54. The transgenic corn plant of claim 48, wherein the level of one or more active GAs in at least one internode tissue of the stem or stalk of the transgenic corn plant is lower than the same internode tissue of a wild-type control plant.

55. The transgenic corn plant of claim 48, wherein the level of one or more active GAs in at least one internode tissue of the stem or stalk of the transgenic corn plant is at least 5%, at least 10%, at least 15%, at least 20%, at least 25%, at least 30%, at least 35%, or at least 40% lower than the same internode tissue of a wild-type control plant.

56. The transgenic corn plant of claim 48, wherein the transgenic corn plant does not have any significant off-types in at least one female organ or ear.

57. A bacterial or host cell comprising the recombinant DNA construct of claim 1.

58. A method for producing a transgenic corn plant, comprising:
(a) transforming at least one cell of an explant with the recombinant DNA construct of claim 1, and
(b) regenerating or developing the transgenic corn plant comprising the recombinant DNA construct from the transformed explant.

59. The method of claim 58, wherein the at least one cell of an explant is transformed via Agrobacterium mediated transformation or particle bombardment.

60. The method of claim 58, wherein the at least one cell of an explant is transformed via site-directed integration using a targeted genome editing technique.

61. The method of claim 60, wherein the at least one cell of an explant is transformed using a recombinant DNA donor template comprising at least one homology arm and an insertion sequence, wherein the at least one homology arm is complementary to a target site in the genome of a corn plant, wherein the insertion sequence comprises a recombinant DNA construct comprising a transcribable DNA sequence encoding a GA2 oxidase protein, wherein the transcribable DNA sequence is operably linked to a plant-expressible promoter, and wherein the insertion sequence comprising the recombinant DNA construct is stably integrated into the genome of the transgenic corn plant.

62. (canceled)

63. The method of claim 61, wherein the at least one homology arm is at least 70%, at least 75%, at least 80%, at least 85%, at least 90%, at least 95%, at least 96%, at least 97%, at least 99% or 100% complementary to at least 20, at least 25, at least 30, at least 35, at least 40, at least 45, at least 50, at least 60, at least 70, at least 80, at least 90, at least 100, at least 150, at least 200, at least 250, at least 500, at least 1000, at least 2500, or at least 5000 consecutive nucleotides of a target site in the genome of a corn plant.

64. The method of claim 58, wherein the at least one cell of an explant is transformed using a site-specific nuclease.

65. The method of claim 64, wherein the site-specific nuclease is a meganuclease, a zinc finger nuclease (ZFN), an RNA-guided endonuclease, a TALE-endonuclease (TALEN), a recombinase, or a transposase.

66. The method of claim 64, wherein the site-specific nuclease is an RNA-guided endonuclease.

67. The method of claim 66, wherein the at least one cell of an explant is further transformed using a guide RNA (gRNA) molecule.

68. The method of claim 67, wherein the RNA-guided endonuclease in association with the guide RNA molecule causes a double strand break or nick at or near a target DNA sequence of the guide RNA in the genome of the corn plant to direct the integration of the insertion sequence into the genome of the transgenic corn plant at or near the target DNA sequence of the guide RNA.

69. The method of claim 67, wherein the guide RNA molecule is a CRISPR RNA (crRNA) or a single-chain guide RNA (sgRNA).

70. The method of claim 68, wherein the guide RNA comprises a sequence complementary to a protospacer adjacent motif (PAM) sequence present in the genome of the transgenic corn plant immediately adjacent to the target DNA sequence of the guide RNA.

71. (canceled)

72. The method of claim 58, further comprising:
(c) selecting a transgenic corn plant comprising the recombinant DNA construct.

73. The method of claim 72, wherein the selecting step (c) comprises determining if the recombinant DNA construct was transformed or integrated into the genome of the transgenic corn plant using a molecular assay.

74. The method of claim 72, wherein the selecting step (c) comprises determining if the recombinant DNA construct was transformed or integrated into the genome of the transgenic corn plant by observing a plant phenotype.

75. A recombinant DNA donor template comprising at least one homology arm and an insertion sequence, wherein the at least one homology arm is at least 70%, at least 75%, at least 80%, at least 85%, at least 90%, at least 95%, at least 96%, at least 97%, at least 99% or 100% complementary to at least 20, at least 25, at least 30, at least 35, at least 40, at least 45, at least 50, at least 60, at least 70, at least 80, at least 90, at least 100, at least 150, at least 200, at least 250, at least 500, at least 1000, at least 2500, or at least 5000 consecutive nucleotides of a target site in the genome of a corn plant, wherein the insertion sequence comprises a recombinant DNA construct comprising a transcribable DNA sequence encoding a GA2 oxidase protein and a plant expressible promoter, and wherein the transcribable DNA sequence is operably linked to the plant expressible promoter.

76. The recombinant DNA donor template of claim 75, wherein the at least one homology arm comprises two homology arms including a first homology arm and a second homology arm, wherein the first homology arm comprises a sequence that is at least 70%, at least 75%, at least 80%, at least 85%, at least 90%, at least 95%, at least 96%, at least 97%, at least 99% or 100% complementary to at least 20, at least 25, at least 30, at least 35, at least 40, at least 45, at least 50, at least 60, at least 70, at least 80, at least 90, at least 100, at least 150, at least 200, at least 250, at least 500, at least 1000, at least 2500, or at least 5000 consecutive nucleotides of a first flanking DNA sequence, and the second homology arm comprises a sequence that is at least 70%, at least 75%, at least 80%, at least 85%, at least 90%, at least 95%, at least 96%, at least 97%, at least 99% or 100% complementary to at least 20, at least 25, at least 30, at least 35, at least 40, at least 45, at least 50, at least 60, at least 70, at least 80, at least 90, at least 100, at least 150, at least 200, at least 250, at least 500, at least 1000, at least 2500, or at least 5000 consecutive nucleotides of a second flanking DNA sequence, wherein the first flanking DNA sequence and the second flanking DNA sequence are genomic sequences at or near the same genomic locus of a corn plant, and wherein the insertion sequence is located between the first homology arm and the second homology arm.

77. A DNA molecule or vector comprising the recombinant DNA donor template of claim 75.

78. The DNA molecule or vector of claim 77, further comprising a polynucleotide sequence encoding a site-specific nuclease

79. The DNA molecule or vector of claim 77, further comprising a polynucleotide sequence encoding a guide RNA.

80. A composition comprising the DNA molecule or vector of claim 77 and a guide RNA.

81. A composition comprising the DNA molecule or vector of claim 77 and a site-specific nuclease.

82. The composition of claim 81, further comprising a guide RNA.

83. A composition comprising a first DNA molecule or vector and a second DNA molecule or vector, wherein the first DNA molecule or vector comprises the recombinant DNA donor template of claim 75 and the second DNA molecule or vector comprises a polynucleotide sequence encoding a site-specific nuclease.

84. The composition of claim 83, wherein the first DNA molecule or vector or the second DNA molecule or vector comprises a polynucleotide sequence encoding a guide RNA.

85. A composition comprising a first DNA molecule or vector and a second DNA molecule or vector, wherein the first DNA molecule or vector comprises the recombinant DNA donor template of claim 75 and the second DNA molecule or vector comprises a polynucleotide sequence encoding a guide RNA.

86. A transgenic corn plant, plant part or plant cell comprising the insertion sequence of the recombinant DNA donor template of claim 75.
